(19) United States
(12) Patent Application Publication
(10) Pub. No.: US 2022/0135690 A1
(43) Pub. Date: May 5, 2022

(54) METHODS AND COMPOSITIONS RELATING TO CHEMOKINE RECEPTOR VARIANTS

(71) Applicant: Twist Bioscience Corporation, South San Francisco, CA (US)

(72) Inventors: Aaron SATO, Burlingame, CA (US); Qiang LIU, Palo Alto, CA (US); Linya WANG, Milpitas, CA (US); Fumiko AXELROD, Palo Alto, CA (US)

(21) Appl. No.: 17/517,528

(22) Filed: Nov. 2, 2021

Related U.S. Application Data
(60) Provisional application No. 63/109,280, filed on Nov. 3, 2020.

(51) Int. Cl. C07K 16/28; A61P 35/00

(52) U.S. Cl. CPC C07K 16/2866; A61P 35/00; A61K 2039/505; C07K 2317/92; C07K 2317/24; C07K 2317/565

(57) ABSTRACT

Provided herein are methods and compositions relating to chemokine receptor libraries having nucleic acids encoding for immunoglobulins that bind to chemokine receptors. Libraries described herein include variegated libraries comprising nucleic acids each encoding for a predetermined variant of at least one predetermined reference nucleic acid sequence. Further described herein are protein libraries generated when the nucleic acid libraries are translated. Further described herein are cell libraries expressing variegated nucleic acid libraries described herein.

### CROSS-REFERENCE

[0001] This application claims the benefit of U.S. Provisional Patent Application No. 63/109,280 filed on Nov. 3, 2020, which is incorporated by reference in its entirety.

### BACKGROUND

[0002] G protein-coupled receptors (GPCRs) are implicated in a wide variety of diseases. Raising antibodies to GPCRs has been difficult due to problems in obtaining suitable antigen because GPCRs are often expressed at low levels in cells and are very unstable when purified. Thus, there is a need for improved agents for therapeutic intervention which target GPCRs.

### INCORPORATION BY REFERENCE

[0003] All publications, patents, and patent applications mentioned in this specification are herein incorporated by reference to the same extent as if each individual publication, patent, or patent application was specifically and individually indicated to be incorporated by reference.

### BRIEF SUMMARY

[0004] Provided herein are antibodies or antibody fragments comprising a variable domain, heavy chain region (VH) and a variable domain, light chain region (VL), wherein VH comprises complementarity determining regions CDRH1, CDRH2, and CDRH3, wherein VL comprises complementarity determining regions CDRL1, CDRL2, and CDRL3, and wherein (a) an amino acid sequence of CDRH1 is as set forth in any one of SEQ ID NOs: 526-662; (b) an amino acid sequence of CDRH2 is as set forth in any one of SEQ ID NOs: 663-977; (c) an amino acid sequence of CDRH3 is as set forth in any one of SEQ ID NOs: 978-1102; (d) an amino acid sequence of CDRL1 is as set forth in any one of SEQ ID NOs: 1103-1267; (e) an amino acid sequence of CDRL2 is as set forth in any one of SEQ ID NOs: 1268-1328; and (f) an amino acid sequence of CDRL3 is as set forth in any one of SEQ ID NOs: 1329-1493. Further provided herein are antibodies or antibody fragments, wherein the antibody is a monoclonal antibody, a polyclonal antibody, a bi-specific antibody, a multispecific antibody, a grafted antibody, a human antibody, a humanized antibody, a synthetic antibody, a chimeric antibody, a camelized antibody, a single-chain Fvs (scFv), a single chain antibody, a Fab fragment, a F(ab′)2 fragment, a Fd fragment, a Fv fragment, a single-domain antibody, an isolated complementarity determining region (CDR), a diabody, a fragment comprised of only a single monomeric variable domain, disulfide-linked Fvs (sdFv), an intrabody, an anti-idiotypic (anti-Id) antibody, or ab antigen-binding fragments thereof. Further provided herein are antibodies or antibody fragments, wherein the antibody or antibody fragment thereof is chimeric or humanized. Further provided herein are antibodies or antibody fragments, wherein the antibody or antibody fragment has an EC50 less than about 25 nanomolar in a cAMP assay. Further provided herein are antibodies or antibody fragments, wherein the antibody or antibody fragment has an EC50 less than about 20 nanomolar in a cAMP assay. Further provided herein are antibodies or antibody fragments, wherein the antibody or antibody fragment has an EC50 less than about 10 nanomolar in a cAMP assay. Further provided herein are antibodies or antibody fragments, wherein the antibody or antibody fragment binds to a chemokine receptor with a K_{D} of less than 100 nM. Further provided herein are antibodies or antibody fragments, wherein the antibody or antibody fragment binds to a chemokine receptor with a K_{D} of less than 75 nM. Further provided herein are antibodies or antibody fragments, wherein the antibody or antibody fragment binds to a chemokine receptor with a K_{D} of less than 50 nM. Further provided herein are antibodies or antibody fragments, wherein the antibody or antibody fragment binds to a chemokine receptor with a K_{D} of less than 10 nM. Further provided herein are antibodies or antibody fragments, wherein the antibody or antibody fragment is an agonist of a chemokine receptor. Further provided herein are antibodies or antibody fragments, wherein the antibody or antibody fragment is an antagonist of a chemokine receptor. Further provided herein are antibodies or antibody fragments, wherein the antibody or antibody fragment is an allosteric modulator of a chemokine receptor. Further provided herein are antibodies or antibody fragments, wherein the allosteric modulator of a chemokine receptor is a negative allosteric modulator. Further provided herein are antibodies or antibody fragments, wherein the chemokine receptor is CXCR4. Further provided herein are antibodies or antibody fragments, wherein the chemokine receptor is CXCR5.

[0005] Provided herein are antibodies or antibody fragments comprising a variable domain, heavy chain region (VH) and a variable domain, light chain region (VL), wherein the VH comprises an amino acid sequence at least about 90% identical to a sequence as set forth in any one of SEQ ID NOs: 24-28 or 34-356, and wherein the VL comprises an amino acid sequence at least about 90% identical to a sequence as set forth in any one of SEQ ID NOs: 29-33 or 357-525. Further provided herein are antibodies or antibody fragments, wherein the VH comprises an amino acid sequence as set forth in any one of SEQ ID NOs: 24-28 or 34-356. Further provided herein are antibodies or antibody fragments, wherein the VL comprises an amino acid sequence as set forth in any one of SEQ ID NOs: 29-33 or 357-525. Further provided herein are antibodies or antibody fragments, wherein the VH comprises an amino acid sequence at least about 90% identical to a sequence as set forth in any one of SEQ ID NOs: 24-28 and the VL comprises an amino acid sequence at least about 90% identical to a sequence as set forth in any one of SEQ ID NOs: 29-33. Further provided herein are antibodies or antibody fragments, wherein the VH comprises an amino acid sequence as set forth in any one of SEQ ID NOs: 24-28 and the VL comprises an amino acid sequence as set forth in any one of SEQ ID NOs: 29-33. Further provided herein are antibodies or antibody fragments, wherein the VH comprises an amino acid sequence at least about 90% identical to a sequence as set forth in any one of SEQ ID NOs: 34-356 and the VL comprises an amino acid sequence at least about 90% identical to a sequence as set forth in any one of SEQ ID NOs: 357-525. Further provided herein are antibodies or antibody fragments, wherein the VH comprises an amino acid sequence as set forth in any one of SEQ ID NOs: 34-356 and the VL comprises an amino acid sequence as set forth in any one of SEQ ID NOs: 357-525. Further provided herein are antibodies or antibody fragments, wherein the antibody is a monoclonal antibody, a polyclonal antibody, a bi-specific antibody, a multispecific antibody, a grafted antibody, a human antibody, a humanized antibody, a synthetic antibody, a chimeric antibody, a camelized antibody, a single-chain Fvs (scFv), a single chain antibody, a Fab fragment, a F(ab′)2 fragment, a Fd fragment, a Fv fragment, a single-domain antibody, an isolated complementarily determining region (CDR), a diabody, a fragment comprised of only a single monomeric variable domain, disulfide-linked Fvs (sdFv), an intrabody, an anti-idiotypic (anti-Id) antibody, or ab antigen-binding fragments thereof. Further provided herein are antibodies or antibody fragments, wherein the antibody or antibody fragment thereof is chimeric or humanized. Further provided herein are antibodies or antibody fragments, wherein the antibody or antibody fragment has an EC50 less than about 25 nanomolar in a cAMP assay. Further provided herein are antibodies or antibody fragments, wherein the antibody or antibody fragment has an EC50 less than about 20 nanomolar in a cAMP assay. Further provided herein are antibodies or antibody fragments, wherein the antibody or antibody fragment has an EC50 less than about 10 nanomolar in a cAMP assay. Further provided herein are antibodies or antibody fragments, wherein the antibody or antibody fragment binds to a chemokine receptor with a K_{D} of less than 100 nM. Further provided herein are antibodies or antibody fragments, wherein the antibody or antibody fragment binds to a chemokine receptor with a K_{D} of less than 75 nM. Further provided herein are antibodies or antibody fragments, wherein the antibody or antibody fragment binds to a chemokine receptor with a K_{D} of less than 50 nM. Further provided herein are antibodies or antibody fragments, wherein the antibody or antibody fragment binds to a chemokine receptor with a K_{D} of less than 10 nM. Further provided herein are antibodies or antibody fragments, wherein the antibody or antibody fragment is an agonist of a chemokine receptor. Further provided herein are antibodies or antibody fragments, wherein the antibody or antibody fragment is an antagonist of a chemokine receptor. Further provided herein are antibodies or antibody fragments, wherein the antibody or antibody fragment is an allosteric modulator of a chemokine receptor. Further provided herein are antibodies or antibody fragments, wherein the allosteric modulator of a chemokine receptor is a negative allosteric modulator. Further provided herein are antibodies or antibody fragments, wherein the chemokine receptor is CXCR4. Further provided herein are antibodies or antibody fragments, wherein the chemokine receptor is CXCR5.

[0006] Provided herein are antibodies or antibody fragments comprising a variable domain, heavy chain region (VH) comprising an amino acid sequence at least about 90% identical to a sequence as set forth in any one of SEQ ID NOs: 24-28 or 34-356. Further provided herein are antibodies or antibody fragments, wherein the VH comprises an amino acid sequence as set forth in any one of SEQ ID NOs: 24-28 or 34-356. Further provided herein are antibodies or antibody fragments, wherein the VH comprises an amino acid sequence at least about 90% identical to a sequence as set forth in any one of SEQ ID NOs: 24-28. Further provided herein are antibodies or antibody fragments, wherein the VH comprises an amino acid sequence as set forth in any one of SEQ ID NOs: 34-356. Further provided herein are antibodies or antibody fragments, wherein the VH comprises an amino acid sequence at least about 90% identical to a sequence as set forth in any one of SEQ ID NOs: 24-28. Further provided herein are antibodies or antibody fragments, wherein the VH comprises an amino acid sequence as set forth in any one of SEQ ID NOs: 34-356. Further provided herein are antibodies or antibody fragments, wherein the antibody is a monoclonal antibody, a polyclonal antibody, a bi-specific antibody, a multispecific antibody, a grafted antibody, a human antibody, a humanized antibody, a synthetic antibody, a chimeric antibody, a camelized antibody, a single-chain Fvs (scFv), a single chain antibody, a Fab fragment, a F(ab′)2 fragment, a Fd fragment, a Fv fragment, a single-domain antibody, an isolated complementarily determining region (CDR), a diabody, a fragment comprised of only a single monomeric variable domain, disulfide-linked Fvs (sdFv), an intrabody, an anti-idiotypic (anti-Id) antibody, or ab antigen-binding fragments thereof. Further provided herein are antibodies or antibody fragments, wherein the antibody is a single-domain antibody. Further provided herein are antibodies or antibody fragments, wherein the antibody or antibody fragment thereof is chimeric or humanized. Further provided herein are antibodies or antibody fragments, wherein the antibody or antibody fragment has an EC50 less than about 25 nanomolar in a cAMP assay. Further provided herein are antibodies or antibody fragments, wherein the antibody or antibody fragment has an EC50 less than about 20 nanomolar in a cAMP assay. Further provided herein are antibodies or antibody fragments, wherein the antibody or antibody fragment has an EC50 less than about 10 nanomolar in a cAMP assay. Further provided herein are antibodies or antibody fragments, wherein the antibody or antibody fragment binds to a chemokine receptor with a K_{D} of less than 100 nM. Further provided herein are antibodies or antibody fragments, wherein the antibody or antibody fragment binds to a chemokine receptor with a K_{D} of less than 75 nM. Further provided herein are antibodies or antibody fragments, wherein the antibody or antibody fragment binds to a chemokine receptor with a K_{D} of less than 50 nM. Further provided herein are antibodies or antibody fragments, wherein the antibody or antibody fragment binds to a chemokine receptor with a K_{D} of less than 10 nM. Further provided herein are antibodies or antibody fragments, wherein the antibody or antibody fragment is an agonist of a chemokine receptor. Further provided herein are antibodies or antibody fragments, wherein the antibody or antibody fragment is an antagonist of a chemokine receptor. Further provided herein are antibodies or antibody fragments, wherein the antibody or antibody fragment is an allosteric modulator of a chemokine receptor. Further provided herein are antibodies or antibody fragments, wherein the allosteric modulator of a chemokine receptor is a negative allosteric modulator. Further provided herein are antibodies or antibody fragments, wherein the chemokine receptor is CXCR4. Further provided herein are antibodies or antibody fragments, wherein the chemokine receptor is CXCR5.

[0007] Provided herein are methods of treating a disease or disorder comprising administering the antibody or antibody fragment described herein. Further provided herein are methods of treating a disease or disorder, wherein the disease or disorder affects homeostasis. Further provided herein are methods of treating a disease or disorder, wherein the disease or disorder characterized by hematopoietic stem cell migration. Further provided herein are methods of treating a disease or disorder, wherein the disease or disorder is a solid cancer or a hematologic cancer. Further provided herein are methods of treating a disease or disorder, wherein the disease or disorder is gastric cancer, breast cancer, colorectal cancer, lung cancer, prostate cancer, hepatocellular carcinoma, leukemia, or lymphoma. Further provided herein are methods of treating a disease or disorder, wherein the disease or disorder is B-cell non-Hodgkin lymphoma. Further provided herein are methods of treating a disease or disorder, wherein the disease or disorder is caused by a virus. Further provided herein are methods of treating a disease or disorder, wherein the disease or disorder is caused by human immunodeficiency virus (HIV).

[0008] Provided herein are nucleic acid compositions comprising: a) a first nucleic acid encoding a variable domain, heavy chain region (VH) comprising complementarity determining regions CDRH1, CDRH2, and CDRH3, and wherein (i) an amino acid sequence of CDRH1 is as set forth in any one of SEQ ID NOs: 526-662; (ii) an amino acid sequence of CDRH2 is as set forth in any one of SEQ ID NOs: 663-977; (iii) an amino acid sequence of CDRH3 is as set forth in any one of SEQ ID NOs: 978-1102; b) a second nucleic acid encoding a variable domain, light chain region (VL) comprising complementarity determining regions CDRL1, CDRL2, and CDRL3, and wherein (i) an amino acid sequence of CDRL1 is as set forth in any one of SEQ ID NOs: 1103-1267; (ii) an amino acid sequence of CDRL2 is as set forth in any one of SEQ ID NOs: 1268-1328; and (iii) an amino acid sequence of CDRL3 is as set forth in any one of SEQ ID NOs: 1329-1493.

[0009] Provided herein are nucleic acid compositions comprising: a) a first nucleic acid encoding a variable domain, heavy chain region (VH) comprising an amino acid sequence at least about 90% identical to a sequence as set forth in any one of SEQ ID NOs: 24-28 or 34-356; b) a second nucleic acid encoding a variable domain, light chain region (VL) comprising at least about 90% identical to a sequence as set forth in any one of SEQ ID NOs: 29-33 or 357-525; and an excipient. Further provided herein are nucleic acid compositions, wherein the VH comprises an amino acid sequence as set forth in any one of SEQ ID NOs: 24-28 or 34-356. Further provided herein are nucleic acid compositions, wherein the VL comprises an amino acid sequence as set forth in any one of SEQ ID NOs: 29-33 or 357-525. Further provided herein are nucleic acid compositions, wherein the VH comprises an amino acid sequence at least about 90% identical to a sequence as set forth in any one of SEQ ID NOs: 24-28 and the VL comprises an amino acid sequence at least about 90% identical to a sequence as set forth in any one of SEQ ID NOs: 29-33. Further provided herein are nucleic acid compositions, wherein the VH comprises an amino acid sequence as set forth in any one of SEQ ID NOs: 24-28 and the VL comprises an amino acid sequence as set forth in any one of SEQ ID NOs: 29-33. Further provided herein are nucleic acid compositions, wherein the VH comprises an amino acid sequence at least about 90% identical to a sequence as set forth in any one of SEQ ID NOs: 34-356 and the VL comprises an amino acid sequence at least about 90% identical to a sequence as set forth in any one of SEQ ID NOs: 357-525. Further provided herein are nucleic acid compositions, wherein the VH comprises an amino acid sequence as set forth in any one of SEQ ID NOs: 34-356 and the VL comprises an amino acid sequence as set forth in any one of SEQ ID NOs: 357-525.

[0010] Provided herein are nucleic acid compositions comprising: a nucleic acid encoding a variable domain, heavy chain region (VH) comprising an amino acid sequence at least about 90% identical to a sequence as set forth in any one of SEQ ID NOs: 24-28 or 34-356; and an excipient. Further provided herein are nucleic acid compositions, wherein the VH comprises an amino acid sequence as set forth in any one of SEQ ID NOs: 24-28 or 34-356. Further provided herein are nucleic acid compositions, wherein the VH comprises an amino acid sequence at least about 90% identical to a sequence as set forth in any one of SEQ ID NOs: 24-28. Further provided herein are nucleic acid compositions, wherein the VH comprises an amino acid sequence as set forth in any one of SEQ ID NOs: 34-356. Further provided herein are nucleic acid compositions, wherein the VH comprises an amino acid sequence at least about 90% identical to a sequence as set forth in any one of SEQ ID NOs: 24-28. Further provided herein are nucleic acid compositions, wherein the VH comprises an amino acid sequence as set forth in any one of SEQ ID NOs: 34-356.

[0011] Provided herein are nucleic acid libraries, comprising: a plurality of nucleic acids, wherein each of the nucleic acids encodes for a sequence that when translated encodes for a chemokine receptor binding immunoglobulin, wherein the chemokine receptor binding immunoglobulin comprises a variant of a chemokine receptor binding domain, wherein the chemokine receptor binding domain is a ligand for the chemokine receptor, and wherein the nucleic acid library comprises at least 10,000 variant immunoglobulin heavy chains and at least 10,000 variant immunoglobulin light chains. Further provided are nucleic acid libraries, wherein the nucleic acid library comprises at least 50,000 variant immunoglobulin heavy chains and at least 50,000 variant immunoglobulin light chains. Further provided are nucleic acid libraries, wherein the nucleic acid library comprises at least 100,000 variant immunoglobulin heavy chains and at least 100,000 variant immunoglobulin light chains. Further provided are nucleic acid libraries, wherein the nucleic acid library comprises at least 10⁵ non-identical nucleic acids. Further provided are nucleic acid libraries, wherein a length of the immunoglobulin heavy chain when translated is about 90 to about 100 amino acids. Further provided are nucleic acid libraries, wherein a length of the immunoglobulin heavy chain when translated is about 100 to about 400 amino acids. Further provided are nucleic acid libraries, wherein the variant immunoglobulin heavy chain when translated comprises at least 80% sequence identity to any one of SEQ ID NOs: 24-28 or 34-356. Further provided are nucleic acid libraries, wherein the variant immunoglobulin light chain when translated comprises at least 80% sequence identity to any one of SEQ ID NOs: 29-33 or 357-525.

[0012] Provided herein are nucleic acid libraries comprising a plurality of nucleic acids, wherein each nucleic acid of the plurality of nucleic acids encodes for a sequence that when translated encodes for an antibody or antibody fragment thereof, wherein the antibody or antibody fragment thereof comprises a variable region of a heavy chain (VH) that comprises a chemokine receptor binding domain, wherein each nucleic acid of the plurality of nucleic acids comprises a sequence encoding for a sequence variant of the chemokine receptor binding domain, and wherein the antibody or antibody fragment binds to its antigen with a K_{D} of less than 100 nM. Further provided are nucleic acid libraries, wherein a length of the VH is about 90 to about 100 amino acids. Further provided are nucleic acid libraries, wherein a length of the VH is about 100 to about 400 amino acids. Further provided are nucleic acid libraries, wherein a length of the VH is about 270 to about 300 base pairs. Further provided are nucleic acid libraries, wherein a length of the VH is about 300 to about 1200 base pairs. Further provided are nucleic acid libraries, wherein the library comprises at least 10⁵ non-identical nucleic acids.

[0013] Provided herein are nucleic acid libraries comprising: a plurality of nucleic acids, wherein each of the nucleic acids encodes for a sequence that when translated encodes for a chemokine receptor single domain antibody, wherein each sequence of the plurality of sequences comprises a variant sequence encoding for a CDR1, CDR2, or CDR3 on a variable region of a heavy chain (VH); wherein the library comprises at least 30,000 variant sequences; and wherein the chemokine receptor single domain antibody binds to its antigen with a K_{D} of less than 100 nM. Further provided are nucleic acid libraries, wherein a length of the VH when translated is about 90 to about 100 amino acids. Further provided are nucleic acid libraries, wherein a length of the VH when translated is about 100 to about 400 amino acids. Further provided are nucleic acid libraries, wherein a length of the VH is about 270 to about 300 base pairs. Further provided are nucleic acid libraries, wherein a length of the VH is about 300 to about 1200 base pairs. Further provided are nucleic acid libraries, wherein the VH when translated comprises at least 80% sequence identity to any one of SEQ ID NO: 24-28 or 34-356.

[0014] Provided herein are antibodies or antibody fragments that binds chemokine receptor, comprising an immunoglobulin heavy chain and an immunoglobulin light chain: (a) wherein the immunoglobulin heavy chain comprises an amino acid sequence at least about 90% identical to that set forth in any one of SEQ ID NO: 24-28 or 34-356; and (b) wherein the immunoglobulin light chain comprises an amino acid sequence at least about 90% identical to that set forth in any one of SEQ ID NO: 29-33 or 357-525. Further provided herein are antibodies or antibody fragments, wherein the antibody is a monoclonal antibody, a polyclonal antibody, a bi-specific antibody, a multispecific antibody, a grafted antibody, a human antibody, a humanized antibody, a synthetic antibody, a chimeric antibody, a camelized antibody, a single-chain Fvs (scFv), a single chain antibody, a Fab fragment, a F(ab′)2 fragment, a Fd fragment, a Fv fragment, a single-domain antibody, an isolated complementarity determining region (CDR), a diabody, a fragment comprised of only a single monomeric variable domain, disulfide-linked Fvs (sdFv), an intrabody, an anti-idiotypic (anti-Id) antibody, or ab antigen-binding fragments thereof. Further provided herein are antibodies or antibody fragments, wherein the antibody or antibody fragment thereof is chimeric or humanized. Further provided herein are antibodies or antibody fragments, wherein the antibody has an EC50 less than about 25 nanomolar in a cAMP assay. Further provided herein are antibodies or antibody fragments, wherein the antibody has an EC50 less than about 20 nanomolar in a cAMP assay. Further provided herein are antibodies or antibody fragments, wherein the antibody has an EC50 less than about 10 nanomolar in a cAMP assay.

[0015] Provided herein are antibodies or antibody fragments, wherein the antibody or antibody fragment comprises a complementarity determining region (CDR) comprising an amino acid sequence at least about 90% identical to that set forth in any one of SEQ ID NOs: 526-1493.

[0016] Provided herein are antibodies or antibody fragments, wherein the antibody or antibody fragment comprises a sequence of any one of SEQ ID NOs: 526-1493 and wherein the antibody is a monoclonal antibody, a polyclonal antibody, a bi-specific antibody, a multispecific antibody, a grafted antibody, a human antibody, a humanized antibody, a synthetic antibody, a chimeric antibody, a camelized antibody, a single-chain Fvs (scFv), a single chain antibody, a Fab fragment, a F(ab′)2 fragment, a Fd fragment, a Fv fragment, a single-domain antibody, an isolated complementarity determining region (CDR), a diabody, a fragment comprised of only a single monomeric variable domain, disulfide-linked Fvs (sdFv), an intrabody, an anti-idiotypic (anti-Id) antibody, or ab antigen-binding fragments thereof.

[0017] Provided herein are methods for generating a nucleic acid library encoding for a chemokine receptor antibody or antibody fragment thereof comprising: (a) providing predetermined sequences encoding for: i. a first plurality of polynucleotides, wherein each polynucleotide of the first plurality of polynucleotides encodes for at least 1000 variant sequence encoding for CDR1 on a heavy chain; ii. a second plurality of polynucleotides, wherein each polynucleotide of the second plurality of polynucleotides encodes for at least 1000 variant sequence encoding for CDR2 on a heavy chain; iii. a third plurality of polynucleotides, wherein each polynucleotide of the third plurality of polynucleotides encodes for at least 1000 variant sequence encoding for CDR3 on a heavy chain; and (b) mixing the first plurality of polynucleotides, the second plurality of polynucleotides, and the third plurality of polynucleotides to form the nucleic acid library of variant nucleic acids encoding for the chemokine receptor antibody or antibody fragment thereof, and wherein at least about 70% of the variant nucleic acids encode for an antibody or antibody fragment that binds to its antigen with a K_{D} of less than 100 nM. Further provided herein are methods, wherein the chemokine receptor antibody or antibody fragment thereof is a single domain antibody. Further provided herein are methods, wherein the single domain antibody comprises one heavy chain variable domain. Further provided herein are methods, wherein the single domain antibody is a VHH antibody. Further provided herein are methods, wherein the nucleic acid library comprises at least 50,000 variant sequences. Further provided herein are methods, wherein the nucleic acid library comprises at least 100,000 variant sequences. Further provided herein are methods, wherein the nucleic acid library comprises at least 10⁵ non-identical nucleic acids. Further provided herein are methods, wherein the nucleic acid library comprises at least one sequence encoding for the chemokine receptor antibody or antibody fragment that binds to chemokine receptor with a K_{D} of less than 75 nM. Further provided herein are methods, wherein the nucleic acid library comprises at least one sequence encoding for the chemokine receptor antibody or antibody fragment that binds to chemokine receptor with a K_{D} of less than 50 nM. Further provided herein are methods, wherein the nucleic acid library comprises at least one sequence encoding for the chemokine receptor antibody or antibody fragment that binds to chemokine receptor with a K_{D} of less than 10 nM. Further provided herein are methods, wherein the nucleic acid library comprises at least 500 variant sequences. Further provided herein are methods, wherein the nucleic acid library comprises at least five sequences encoding for the chemokine receptor antibody or antibody fragment that binds to chemokine receptor with a K_{D} of less than 75 nM.

[0018] Provided herein are protein libraries encoded by the nucleic acid library described herein, wherein the protein library comprises peptides. Further provided herein are protein libraries, wherein the protein library comprises immunoglobulins. Further provided herein are protein libraries, wherein the protein library comprises antibodies. Further provided herein are protein libraries, wherein the protein library is a peptidomimetic library.

[0019] Provided herein are vector libraries comprising the nucleic acid library described herein.

[0020] Provided herein are cell libraries comprising the nucleic acid library described herein.

[0021] Provided herein are cell libraries comprising the protein library described herein.

### BRIEF DESCRIPTION OF THE DRAWINGS

[0022] FIG. 1A depicts a first schematic of an immunoglobulin scaffold.

[0023] FIG. 1B depicts a second schematic of an immunoglobulin scaffold.

[0024] FIG. 2 depicts a schematic of a motif for placement in a scaffold.

[0025] FIG. 3 presents a diagram of steps demonstrating an exemplary process workflow for gene synthesis as disclosed herein.

[0026] FIG. 4 illustrates an example of a computer system.

[0027] FIG. 5 is a block diagram illustrating an architecture of a computer system.

[0028] FIG. 6 is a diagram demonstrating a network configured to incorporate a plurality of computer systems, a plurality of cell phones and personal data assistants, and Network Attached Storage (NAS).

[0029] FIG. 7 is a block diagram of a multiprocessor computer system using a shared virtual address memory space.

[0030] FIG. 8A depicts a schematic of an immunoglobulin scaffold comprising a VH domain attached to a VL domain using a linker.

[0031] FIG. 8B depicts a schematic of a full-domain architecture of an immunoglobulin scaffold comprising a VH domain attached to a VL domain using a linker, a leader sequence, and pill sequence.

[0032] FIG. 8C depicts a schematic of four framework elements (FW1, FW2, FW3, FW4) and the variable 3 CDR (L1, L2, L3) elements for a VL or VH domain.

[0033] FIG. 9A depicts a structure of Glucagon-like peptide 1 (GLP-1, cyan) in complex with GLP-1 receptor (GLP-1R, grey), PDB entry 5VAI.

[0034] FIG. 9B depicts a crystal structure of CXCR4 chemokine receptor (grey) in complex with a cyclic peptide antagonist CVX15 (blue), PDB entry 3OR0.

[0035] FIG. 9C depicts a crystal structure of human smoothened with the transmembrane domain in grey and extracellular domain (ECD) in orange, PDB entry 5L7D. The ECD contacts the TMD through extracellular loop 3 (ECL3).

[0036] FIG. 9D depicts a structure of GLP-1R (grey) in complex with a Fab (magenta), PDB entry 6LN2.

[0037] FIG. 9E depicts a crystal structure of CXCR4 (grey) in complex with a viral chemokine antagonist Viral macrophage inflammatory protein 2 (vMIP-II, green), PDB entry 4RWS.

[0038] FIG. 10 depicts a schema of the GPCR focused library design. Two germline heavy chain VH1-69 and VH3-30; 4 germline light chain IGKV1-39 and IGKV3-15, and IGLV1-51 and IGLV2-14.

[0039] FIG. 11 depicts a graph of HCDR3 length distribution in the GPCR-focused library compared to the HCDR3 length distribution in B-cell populations from three healthy adult donors. In total, 2,444,718 unique VH sequences from the GPCR library and 2,481,511 unique VH sequences from human B-cell repertoire were analyzed to generate the length distribution plot.

[0040] FIG. 12 depicts a graph of data from CXCR4 variants in a titration assay.

[0041] FIG. 13 depicts exemplary CXCR4 variant sequences.

[0042] FIG. 14A depicts a graph of data from CXCR4 variants in an allosteric cAMP peptide assay.

[0043] FIG. 14B depicts a graph of data from CXCR4 variants in an antagonistic cAMP peptide assay.

[0044] FIG. 15A depicts a graph showing ligand titrations of CXCR4 variants determined using Homogeneous Time Resolved Fluorescence (HTRF).

[0045] FIG. 15B depicts a graph of different ligand titrations of CXCR4 variants.

[0046] FIG. 15C depicts a graph of peptide/IgG ligand titrations with CXCR4 variants determined using HTRF.

[0047] FIG. 15D depicts a graph of different peptide/IgG ligand titrations with CXCR4 variants.

[0048] FIG. 16A depicts data from flow titration assays using variant CXCR4-81-6.

[0049] FIG. 16B depicts a graph of a cAMP assay using variant CXCR4-81-6.

[0050] FIGS. 17A-17D depict graphs of data from CXCR5 variants in a titration assay.

### DETAILED DESCRIPTION

[0051] The present disclosure employs, unless otherwise indicated, conventional molecular biology techniques, which are within the skill of the art. Unless defined otherwise, all technical and scientific terms used herein have the same meaning as is commonly understood by one of ordinary skill in the art.

### Definitions

[0052] Throughout this disclosure, various embodiments are presented in a range format. It should be understood that the description in range format is merely for convenience and brevity and should not be construed as an inflexible limitation on the scope of any embodiments. Accordingly, the description of a range should be considered to have specifically disclosed all the possible subranges as well as individual numerical values within that range to the tenth of the unit of the lower limit unless the context clearly dictates otherwise. For example, description of a range such as from 1 to 6 should be considered to have specifically disclosed subranges such as from 1 to 3, from 1 to 4, from 1 to 5, from 2 to 4, from 2 to 6, from 3 to 6 etc., as well as individual values within that range, for example, 1.1, 2, 2.3, 5, and 5.9. This applies regardless of the breadth of the range. The upper and lower limits of these intervening ranges may independently be included in the smaller ranges, and are also encompassed within the disclosure, subject to any specifically excluded limit in the stated range. Where the stated range includes one or both of the limits, ranges excluding either or both of those included limits are also included in the disclosure, unless the context clearly dictates otherwise.

[0053] The terminology used herein is for the purpose of describing particular embodiments only and is not intended to be limiting of any embodiment. As used herein, the singular forms “a,” “an” and “the” are intended to include the plural forms as well, unless the context clearly indicates otherwise. It will be further understood that the terms “comprises” and/or “comprising,” when used in this specification, specify the presence of stated features, integers, steps, operations, elements, and/or components, but do not preclude the presence or addition of one or more other features, integers, steps, operations, elements, components, and/or groups thereof. As used herein, the term “and/or” includes any and all combinations of one or more of the associated listed items.

[0054] Unless specifically stated or obvious from context, as used herein, the term “about” in reference to a number or range of numbers is understood to mean the stated number and numbers +/−10% thereof, or 10% below the lower listed limit and 10% above the higher listed limit for the values listed for a range.

[0055] Unless specifically stated, as used herein, the term “nucleic acid” encompasses double- or triple-stranded nucleic acids, as well as single-stranded molecules. In double- or triple-stranded nucleic acids, the nucleic acid strands need not be coextensive (i.e., a double-stranded nucleic acid need not be double-stranded along the entire length of both strands). Nucleic acid sequences, when provided, are listed in the 5′ to 3′ direction, unless stated otherwise. Methods described herein provide for the generation of isolated nucleic acids. Methods described herein additionally provide for the generation of isolated and purified nucleic acids. A “nucleic acid” as referred to herein can comprise at least 5, 10, 20, 30, 40, 50, 60, 70, 80, 90, 100, 125, 150, 175, 200, 225, 250, 275, 300, 325, 350, 375, 400, 425, 450, 475, 500, 600, 700, 800, 900, 1000, 1100, 1200, 1300, 1400, 1500, 1600, 1700, 1800, 1900, 2000, or more bases in length. Moreover, provided herein are methods for the synthesis of any number of polypeptide-segments encoding nucleotide sequences, including sequences encoding non-ribosomal peptides (NRPs), sequences encoding non-ribosomal peptide-synthetase (NRPS) modules and synthetic variants, polypeptide segments of other modular proteins, such as antibodies, polypeptide segments from other protein families, including non-coding DNA or RNA, such as regulatory sequences e.g. promoters, transcription factors, enhancers, siRNA, shRNA, RNAi, miRNA, small nucleolar RNA derived from microRNA, or any functional or structural DNA or RNA unit of interest. The following are non-limiting examples of polynucleotides: coding or non-coding regions of a gene or gene fragment, intergenic DNA, loci (locus) defined from linkage analysis, exons, introns, messenger RNA (mRNA), transfer RNA, ribosomal RNA, short interfering RNA (siRNA), short-hairpin RNA (shRNA), micro-RNA (miRNA), small nucleolar RNA, ribozymes, complementary DNA (cDNA), which is a DNA representation of mRNA, usually obtained by reverse transcription of messenger RNA (mRNA) or by amplification; DNA molecules produced synthetically or by amplification, genomic DNA, recombinant polynucleotides, branched polynucleotides, plasmids, vectors, isolated DNA of any sequence, isolated RNA of any sequence, nucleic acid probes, and primers. cDNA encoding for a gene or gene fragment referred herein may comprise at least one region encoding for exon sequences without an intervening intron sequence in the genomic equivalent sequence.

[0056] GPCR Libraries for Chemokine Receptor

[0057] Provided herein are methods and compositions relating to G protein-coupled receptor (GPCR) binding libraries for chemokine receptor comprising nucleic acids encoding for a scaffold comprising a GPCR binding domain. Scaffolds as described herein can stably support a GPCR binding domain. The GPCR binding domain may be designed based on surface interactions of a chemokine receptor ligand and a chemokine receptor. In some instances, the chemokine receptor is CXCR5 receptor. In some instances, the chemokine receptor is CXCR4 receptor. Libraries as described herein may be further variegated to provide for variant libraries comprising nucleic acids each encoding for a predetermined variant of at least one predetermined reference nucleic acid sequence. Further described herein are protein libraries that may be generated when the nucleic acid libraries are translated. In some instances, nucleic acid libraries as described herein are transferred into cells to generate a cell library. Also provided herein are downstream applications for the libraries synthesized using methods described herein. Downstream applications include identification of variant nucleic acids or protein sequences with enhanced biologically relevant functions, e.g., improved stability, affinity, binding, functional activity, and for the treatment or prevention of a disease state associated with GPCR signaling.

[0058] Scaffold Libraries

[0059] Provided herein are libraries comprising nucleic acids encoding for a scaffold, wherein sequences for GPCR binding domains are placed in the scaffold. Scaffold described herein allow for improved stability for a range of GPCR binding domain encoding sequences when inserted into the scaffold, as compared to an unmodified scaffold. Exemplary scaffolds include, but are not limited to, a protein, a peptide, an immunoglobulin, derivatives thereof, or combinations thereof. In some instances, the scaffold is an immunoglobulin. Scaffolds as described herein comprise improved functional activity, structural stability, expression, specificity, or a combination thereof. In some instances, scaffolds comprise long regions for supporting a GPCR binding domain.

[0060] Provided herein are libraries comprising nucleic acids encoding for a scaffold, wherein the scaffold is an immunoglobulin. In some instances, the immunoglobulin is an antibody. As used herein, the term antibody will be understood to include proteins having the characteristic two-armed, Y-shape of a typical antibody molecule as well as one or more fragments of an antibody that retain the ability to specifically bind to an antigen. Exemplary antibodies include, but are not limited to, a monoclonal antibody, a polyclonal antibody, a bi-specific antibody, a multispecific antibody, a grafted antibody, a human antibody, a humanized antibody, a synthetic antibody, a chimeric antibody, a camelized antibody, a single-chain Fvs (scFv) (including fragments in which the VL and VH are joined using recombinant methods by a synthetic or natural linker that enables them to be made as a single protein chain in which the VL and VH regions pair to form monovalent molecules, including single chain Fab and scFab), a single chain antibody, a Fab fragment (including monovalent fragments comprising the VL, VH, CL, and CH1 domains), a F(ab′)2 fragment (including bivalent fragments comprising two Fab fragments linked by a disulfide bridge at the hinge region), a Fd fragment (including fragments comprising the VH and CH1 fragment), a Fv fragment (including fragments comprising the VL and VH domains of a single arm of an antibody), a single-domain antibody (dAb or sdAb) (including fragments comprising a VH domain), an isolated complementarity determining region (CDR), a diabody (including fragments comprising bivalent dimers such as two VL and VH domains bound to each other and recognizing two different antigens), a fragment comprised of only a single monomeric variable domain, disulfide-linked Fvs (sdFv), an intrabody, an anti-idiotypic (anti-Id) antibody, or ab antigen-binding fragments thereof. In some instances, the libraries disclosed herein comprise nucleic acids encoding for a scaffold, wherein the scaffold is a Fv antibody, including Fv antibodies comprised of the minimum antibody fragment which contains a complete antigen-recognition and antigen-binding site. In some embodiments, the Fv antibody consists of a dimer of one heavy chain and one light chain variable domain in tight, non-covalent association, and the three hypervariable regions of each variable domain interact to define an antigen-binding site on the surface of the VH-VL dimer. In some embodiments, the six hypervariable regions confer antigen-binding specificity to the antibody. In some embodiments, a single variable domain (or half of an Fv comprising only three hypervariable regions specific for an antigen, including single domain antibodies isolated from camelid animals comprising one heavy chain variable domain such as VHH antibodies or nanobodies) has the ability to recognize and bind antigen. In some instances, the libraries disclosed herein comprise nucleic acids encoding for a scaffold, wherein the scaffold is a single-chain Fv or scFv, including antibody fragments comprising a VH, a VL, or both a VH and VL domain, wherein both domains are present in a single polypeptide chain. In some embodiments, the Fv polypeptide further comprises a polypeptide linker between the VH and VL domains allowing the scFv to form the desired structure for antigen binding. In some instances, a scFv is linked to the Fc fragment or a VHH is linked to the Fc fragment (including minibodies). In some instances, the antibody comprises immunoglobulin molecules and immunologically active fragments of immunoglobulin molecules, e.g., molecules that contain an antigen binding site. Immunoglobulin molecules are of any type (e.g., IgG, IgE, IgM, IgD, IgA and IgY), class (e.g., IgG 1, IgG 2, IgG 3, IgG 4, IgA 1 and IgA 2) or subclass.

[0061] In some embodiments, libraries comprise immunoglobulins that are adapted to the species of an intended therapeutic target. Generally, these methods include “mammalization” and comprises methods for transferring donor antigen-binding information to a less immunogenic mammal antibody acceptor to generate useful therapeutic treatments. In some instances, the mammal is mouse, rat, equine, sheep, cow, primate (e.g., chimpanzee, baboon, gorilla, orangutan, monkey), dog, cat, pig, donkey, rabbit, and human. In some instances, provided herein are libraries and methods for felinization and caninization of antibodies.

[0062] “Humanized” forms of non-human antibodies can be chimeric antibodies that contain minimal sequence derived from the non-human antibody. A humanized antibody is generally a human antibody (recipient antibody) in which residues from one or more CDRs are replaced by residues from one or more CDRs of a non-human antibody (donor antibody). The donor antibody can be any suitable non-human antibody, such as a mouse, rat, rabbit, chicken, or non-human primate antibody having a desired specificity, affinity, or biological effect. In some instances, selected framework region residues of the recipient antibody are replaced by the corresponding framework region residues from the donor antibody. Humanized antibodies may also comprise residues that are not found in either the recipient antibody or the donor antibody. In some instances, these modifications are made to further refine antibody performance.

[0063] “Caninization” can comprise a method for transferring non-canine antigen-binding information from a donor antibody to a less immunogenic canine antibody acceptor to generate treatments useful as therapeutics in dogs. In some instances, caninized forms of non-canine antibodies provided herein are chimeric antibodies that contain minimal sequence derived from non-canine antibodies. In some instances, caninized antibodies are canine antibody sequences (“acceptor” or “recipient” antibody) in which hypervariable region residues of the recipient are replaced by hypervariable region residues from a non-canine species (“donor” antibody) such as mouse, rat, rabbit, cat, dogs, goat, chicken, bovine, horse, llama, camel, dromedaries, sharks, non-human primates, human, humanized, recombinant sequence, or an engineered sequence having the desired properties. In some instances, framework region (FR) residues of the canine antibody are replaced by corresponding non-canine FR residues. In some instances, caninized antibodies include residues that are not found in the recipient antibody or in the donor antibody. In some instances, these modifications are made to further refine antibody performance. The caninized antibody may also comprise at least a portion of an immunoglobulin constant region (Fc) of a canine antibody.

[0064] “Felinization” can comprise a method for transferring non-feline antigen-binding information from a donor antibody to a less immunogenic feline antibody acceptor to generate treatments useful as therapeutics in cats. In some instances, felinized forms of non-feline antibodies provided herein are chimeric antibodies that contain minimal sequence derived from non-feline antibodies. In some instances, felinized antibodies are feline antibody sequences (“acceptor” or “recipient” antibody) in which hypervariable region residues of the recipient are replaced by hypervariable region residues from a non-feline species (“donor” antibody) such as mouse, rat, rabbit, cat, dogs, goat, chicken, bovine, horse, llama, camel, dromedaries, sharks, non-human primates, human, humanized, recombinant sequence, or an engineered sequence having the desired properties. In some instances, framework region (FR) residues of the feline antibody are replaced by corresponding non-feline FR residues. In some instances, felinized antibodies include residues that are not found in the recipient antibody or in the donor antibody. In some instances, these modifications are made to further refine antibody performance. The felinized antibody may also comprise at least a portion of an immunoglobulin constant region (Fc) of a felinize antibody.

[0065] Provided herein are libraries comprising nucleic acids encoding for a scaffold, wherein the scaffold is a non-immunoglobulin. In some instances, the scaffold is a non-immunoglobulin binding domain. For example, the scaffold is an antibody mimetic. Exemplary antibody mimetics include, but are not limited to, anticalins, affilins, affibody molecules, affimers, affitins, alphabodies, avimers, atrimers, DARPins, fynomers, Kunitz domain-based proteins, monobodies, anticalins, knottins, armadillo repeat protein-based proteins, and bicyclic peptides.

[0066] Libraries described herein comprising nucleic acids encoding for a scaffold, wherein the scaffold is an immunoglobulin, comprise variations in at least one region of the immunoglobulin. Exemplary regions of the antibody for variation include, but are not limited to, a complementarity-determining region (CDR), a variable domain, or a constant domain. In some instances, the CDR is CDR1, CDR2, or CDR3. In some instances, the CDR is a heavy domain including, but not limited to, CDRH1, CDRH2, and CDRH3. In some instances, the CDR is a light domain including, but not limited to, CDRL1, CDRL2, and CDRL3. In some instances, the variable domain is variable domain, light chain (VL) or variable domain, heavy chain (VH). In some instances, the VL domain comprises kappa or lambda chains. In some instances, the constant domain is constant domain, light chain (CL) or constant domain, heavy chain (CH).

[0067] Methods described herein provide for synthesis of libraries comprising nucleic acids encoding for a scaffold, wherein each nucleic acid encodes for a predetermined variant of at least one predetermined reference nucleic acid sequence. In some cases, the predetermined reference sequence is a nucleic acid sequence encoding for a protein, and the variant library comprises sequences encoding for variation of at least a single codon such that a plurality of different variants of a single residue in the subsequent protein encoded by the synthesized nucleic acid are generated by standard translation processes. In some instances, the scaffold library comprises varied nucleic acids collectively encoding variations at multiple positions. In some instances, the variant library comprises sequences encoding for variation of at least a single codon of a CDRH1, CDRH2, CDRH3, CDRL1, CDRL2, CDRL3, VL, or VH domain. In some instances, the variant library comprises sequences encoding for variation of multiple codons of a CDRH1, CDRH2, CDRH3, CDRL1, CDRL2, CDRL3, VL, or VH domain. In some instances, the variant library comprises sequences encoding for variation of multiple codons of framework element 1 (FW1), framework element 2 (FW2), framework element 3 (FW3), or framework element 4 (FW4). An exemplary number of codons for variation include, but are not limited to, at least or about 1, 5, 10, 15, 20, 25, 30, 35, 40, 45, 50, 55, 60, 65, 70, 75, 80, 85, 90, 95, 100, 125, 150, 175, 225, 250, 275, 300, or more than 300 codons.

[0068] In some instances, the at least one region of the immunoglobulin for variation is from heavy chain V-gene family, heavy chain D-gene family, heavy chain J-gene family, light chain V-gene family, or light chain J-gene family. See FIGS. 1A-1B. In some instances, the light chain V-gene family comprises immunoglobulin kappa (IGK) gene or immunoglobulin lambda (IGL). Exemplary genes include, but are not limited to, IGHV1-18, IGHV1-69, IGHV1-8, IGHV3-21, IGHV3-23, IGHV3-30/33m, IGHV3-28, IGHV1-69, IGHV3-74, IGHV4-39, IGHV4-59/61, IGKV1-39, IGKV1-9, IGKV2-28, IGKV3-11, IGKV3-15, IGKV3-20, IGKV4-1, IGLV1-51, IGLV2-14, IGLV1-40, and IGLV3-1. In some instances, the gene is IGKJ1, IGKJ4, or IGKJ2. In some instances, the gene is IGKV1 or IGKV2. In some instances, the gene is IGHV1-69, IGHV3-30, IGHV3-23, IGHV3, IGHV1-46, IGHV3-7, IGHV1, or IGHV1-8. In some instances, the gene is IGHV1 or IGHV3. In some instances, the gene is IGHV1-69 and IGHV3-30. In some instances, the gene is IGHJ3, IGHJ6, IGHJ, IGHJ4, IGHJ5, IGHJ2, or IGH1. In some instances, the gene is IGHJ3, IGHJ6, IGHJ, or IGHJ4. In some instances, the gene is IGHJ2, IGHJ4, IGHJ5, or IGHJ6.

[0069] Provided herein are libraries comprising nucleic acids encoding for immunoglobulin scaffolds, wherein the libraries are synthesized with various numbers of fragments. In some instances, the fragments comprise the CDRH1, CDRH2, CDRH3, CDRL1, CDRL2, CDRL3, VL, or VH domain. In some instances, the fragments comprise framework element 1 (FW1), framework element 2 (FW2), framework element 3 (FW3), or framework element 4 (FW4). In some instances, the scaffold libraries are synthesized with at least or about 2 fragments, 3 fragments, 4 fragments, 5 fragments, or more than 5 fragments. The length of each of the nucleic acid fragments or average length of the nucleic acids synthesized may be at least or about 50, 75, 100, 125, 150, 175, 200, 225, 250, 275, 300, 325, 350, 375, 400, 425, 450, 475, 500, 525, 550, 575, 600, or more than 600 base pairs. In some instances, the length is about 50 to 600, 75 to 575, 100 to 550, 125 to 525, 150 to 500, 175 to 475, 200 to 450, 225 to 425, 250 to 400, 275 to 375, or 300 to 350 base pairs.

[0070] Libraries comprising nucleic acids encoding for immunoglobulin scaffolds as described herein comprise various lengths of amino acids when translated. In some instances, the length of each of the amino acid fragments or average length of the amino acid synthesized may be at least or about 15, 20, 25, 30, 35, 40, 45, 50, 55, 60, 65, 70, 75, 80, 85, 90, 95, 100, 105, 110, 115, 120, 125, 130, 135, 140, 145, 150, or more than 150 amino acids. In some instances, the length of the amino acid is about 15 to 150, 20 to 145, 25 to 140, 30 to 135, 35 to 130, 40 to 125, 45 to 120, 50 to 115, 55 to 110, 60 to 110, 65 to 105, 70 to 100, or 75 to 95 amino acids. In some instances, the length of the amino acid is about 22 amino acids to about 75 amino acids. In some instances, the immunoglobulin scaffolds comprise at least or about 100, 200, 300, 400, 500, 600, 700, 800, 900, 1000, 2000, 3000, 4000, 5000, or more than 5000 amino acids.

[0071] A number of variant sequences for the at least one region of the immunoglobulin for variation are de novo synthesized using methods as described herein. In some instances, a number of variant sequences is de novo synthesized for CDRH1, CDRH2, CDRH3, CDRL1, CDRL2, CDRL3, VL, VH, or combinations thereof. In some instances, a number of variant sequences is de novo synthesized for framework element 1 (FW1), framework element 2 (FW2), framework element 3 (FW3), or framework element 4 (FW4). The number of variant sequences may be at least or about 5, 10, 15, 20, 25, 30, 35, 40, 45, 50, 55, 60, 65, 70, 75, 80, 85, 90, 95, 100, 125, 150, 175, 200, 225, 250, 275, 300, 325, 350, 375, 400, 425, 450, 475, 500, or more than 500 sequences. In some instances, the number of variant sequences is at least or about 500, 600, 700, 800, 900, 1000, 2000, 3000, 4000, 5000, 6000, 7000, 8000, or more than 8000 sequences. In some instances, the number of variant sequences is about 10 to 500, 25 to 475, 50 to 450, 75 to 425, 100 to 400, 125 to 375, 150 to 350, 175 to 325, 200 to 300, 225 to 375, 250 to 350, or 275 to 325 sequences.

[0072] Variant sequences for the at least one region of the immunoglobulin, in some instances, vary in length or sequence. In some instances, the at least one region that is de novo synthesized is for CDRH1, CDRH2, CDRH3, CDRL1, CDRL2, CDRL3, VL, VH, or combinations thereof. In some instances, the at least one region that is de novo synthesized is for framework element 1 (FW1), framework element 2 (FW2), framework element 3 (FW3), or framework element 4 (FW4). In some instances, the variant sequence comprises at least or about 1, 2, 3, 4, 5, 6, 7, 8, 9, 10, 15, 20, 25, 30, 35, 40, 45, 50, or more than 50 variant nucleotides or amino acids as compared to wild-type. In some instances, the variant sequence comprises at least or about 1, 2, 3, 4, 5, 6, 7, 8, 9, 10, 15, 20, 25, 30, 35, 40, 45, or 50 additional nucleotides or amino acids as compared to wild-type. In some instances, the variant sequence comprises at least or about 1, 2, 3, 4, 5, 6, 7, 8, 9, 10, 15, 20, 25, 30, 35, 40, 45, or 50 less nucleotides or amino acids as compared to wild-type. In some instances, the libraries comprise at least or about 10¹, 10², 10³, 10⁴, 10⁵, 10⁶, 10⁷, 10⁸, 10⁹, 10¹⁰, or more than 10¹⁰ variants.

[0073] Following synthesis of scaffold libraries, scaffold libraries may be used for screening and analysis. For example, scaffold libraries are assayed for library displayability and panning. In some instances, displayability is assayed using a selectable tag. Exemplary tags include, but are not limited to, a radioactive label, a fluorescent label, an enzyme, a chemiluminescent tag, a colorimetric tag, an affinity tag or other labels or tags that are known in the art. In some instances, the tag is histidine, polyhistidine, myc, hemagglutinin (HA), or FLAG. In some instances, scaffold libraries are assayed by sequencing using various methods including, but not limited to, single-molecule real-time (SMRT) sequencing, Polony sequencing, sequencing by ligation, reversible terminator sequencing, proton detection sequencing, ion semiconductor sequencing, nanopore sequencing, electronic sequencing, pyrosequencing, Maxam-Gilbert sequencing, chain termination (e.g., Sanger) sequencing, +S sequencing, or sequencing by synthesis.

[0074] In some instances, the scaffold libraries are assayed for functional activity, structural stability (e.g., thermal stable or pH stable), expression, specificity, or a combination thereof. In some instances, the scaffold libraries are assayed for scaffolds capable of folding. In some instances, a region of the antibody is assayed for functional activity, structural stability, expression, specificity, folding, or a combination thereof. For example, a VH region or VL region is assayed for functional activity, structural stability, expression, specificity, folding, or a combination thereof

[0075] Chemokine Receptor Libraries

[0076] Provided herein are chemokine receptor binding libraries comprising nucleic acids encoding for scaffolds comprising sequences for chemokine receptor binding domains. In some instances, the scaffolds are immunoglobulins. In some instances, the scaffolds comprising sequences for chemokine receptor binding domains are determined by interactions between the chemokine receptor binding domains and the chemokine receptor.

[0077] Provided herein are libraries comprising nucleic acids encoding scaffolds comprising chemokine receptor binding domains, wherein the chemokine receptor binding domains are designed based on surface interactions on chemokine receptor. In some instances, the chemokine receptor comprises a sequence as defined by SEQ ID NO: 1. In some instances, the chemokine receptor binding domains interact with the amino- or carboxy-terminus of the chemokine receptor. In some instances, the chemokine receptor binding domains interact with at least one transmembrane domain including, but not limited to, transmembrane domain 1 (TM1), transmembrane domain 2 (TM2), transmembrane domain 3 (TM3), transmembrane domain 4 (TM4), transmembrane domain 5 (TM5), transmembrane domain 6 (TM6), and transmembrane domain 7 (TM7). In some instances, the chemokine receptor binding domains interact with an intracellular surface of the chemokine receptor. For example, the chemokine receptor binding domains interact with at least one intracellular loop including, but not limited to, intracellular loop 1 (ICL1), intracellular loop 2 (ICL2), and intracellular loop 3 (ICL3). In some instances, the chemokine receptor binding domains interact with an extracellular surface of the chemokine receptor. For example, the chemokine receptor binding domains interact with at least one extracellular domain (ECD) or extracellular loop (ECL) of the chemokine receptor. The extracellular loops include, but are not limited to, extracellular loop 1 (ECL1), extracellular loop 2 (ECL2), and extracellular loop 3 (ECL3).

[0078] Described herein are chemokine receptor binding domains, wherein the chemokine receptor binding domains are designed based on surface interactions between a chemokine receptor ligand and the chemokine receptor. In some instances, the ligand is a peptide. In some instances, the ligand is CXCL12, migration inhibitory factor (MIF), extracellular Ubiquitin (eUb), Gp120, vMIP-II, or human β3-defensin. In some instances, the ligand is CXCL12-α, CXCL12-β, CXCL12-γ, CXCL12-δ, CXCL12-ε, or CXCL12-φ. In some instances, the ligand is CXCL13. In some instances, the ligand is a chemokine receptor agonist. In some instances, the ligand is a chemokine receptor antagonist. In some instances, the ligand is a chemokine receptor allosteric modulator. In some instances, the allosteric modulator is a negative allosteric modulator. In some instances, the allosteric modulator is a positive allosteric modulator.

[0079] Sequences of chemokine receptor binding domains based on surface interactions between a chemokine receptor ligand and the chemokine receptor are analyzed using various methods. For example, multispecies computational analysis is performed. In some instances, a structure analysis is performed. In some instances, a sequence analysis is performed. Sequence analysis can be performed using a database known in the art. Non-limiting examples of databases include, but are not limited to, NCBI BLAST (blast.ncbi.nlm.nih.gov/Blast.cgi), UCSC Genome Browser (genome.ucsc.edu/), UniProt (www.uniprot.org/), and IUPHAR/BPS Guide to PHARMACOLOGY (guidetopharmacology.org/).

[0080] Described herein are chemokine receptor binding domains designed based on sequence analysis among various organisms. For example, sequence analysis is performed to identify homologous sequences in different organisms. Exemplary organisms include, but are not limited to, mouse, rat, equine, sheep, cow, primate (e.g., chimpanzee, baboon, gorilla, orangutan, monkey), dog, cat, pig, donkey, rabbit, fish, fly, and human.

[0081] Following identification of chemokine receptor binding domains, libraries comprising nucleic acids encoding for the chemokine receptor binding domains may be generated. In some instances, libraries of chemokine receptor binding domains comprise sequences of chemokine receptor binding domains designed based on conformational ligand interactions, peptide ligand interactions, small molecule ligand interactions, extracellular domains of chemokine receptor, or antibodies that target chemokine receptor. In some instances, libraries of chemokine receptor binding domains comprise sequences of chemokine receptor binding domains designed based on peptide ligand interactions. Libraries of chemokine receptor binding domains may be translated to generate protein libraries. In some instances, libraries of chemokine receptor binding domains are translated to generate peptide libraries, immunoglobulin libraries, derivatives thereof, or combinations thereof. In some instances, libraries of chemokine receptor binding domains are translated to generate protein libraries that are further modified to generate peptidomimetic libraries. In some instances, libraries of chemokine receptor binding domains are translated to generate protein libraries that are used to generate small molecules.

[0082] Methods described herein provide for synthesis of libraries of chemokine receptor binding domains comprising nucleic acids each encoding for a predetermined variant of at least one predetermined reference nucleic acid sequence. In some cases, the predetermined reference sequence is a nucleic acid sequence encoding for a protein, and the variant library comprises sequences encoding for variation of at least a single codon such that a plurality of different variants of a single residue in the subsequent protein encoded by the synthesized nucleic acid are generated by standard translation processes. In some instances, the libraries of chemokine receptor binding domains comprise varied nucleic acids collectively encoding variations at multiple positions. In some instances, the variant library comprises sequences encoding for variation of at least a single codon in a chemokine receptor binding domain. In some instances, the variant library comprises sequences encoding for variation of multiple codons in a chemokine receptor binding domain. An exemplary number of codons for variation include, but are not limited to, at least or about 1, 5, 10, 15, 20, 25, 30, 35, 40, 45, 50, 55, 60, 65, 70, 75, 80, 85, 90, 95, 100, 125, 150, 175, 225, 250, 275, 300, or more than 300 codons.

[0083] Methods described herein provide for synthesis of libraries comprising nucleic acids encoding for the chemokine receptor binding domains, wherein the libraries comprise sequences encoding for variation of length of the chemokine receptor binding domains. In some instances, the library comprises sequences encoding for variation of length of at least or about 1, 5, 10, 15, 20, 25, 30, 35, 40, 45, 50, 55, 60, 65, 70, 75, 80, 85, 90, 95, 100, 125, 150, 175, 225, 250, 275, 300, or more than 300 codons less as compared to a predetermined reference sequence. In some instances, the library comprises sequences encoding for variation of length of at least or about 1, 5, 10, 15, 20, 25, 30, 35, 40, 45, 50, 55, 60, 65, 70, 75, 80, 85, 90, 95, 100, 125, 150, 175, 200, 225, 250, 275, 300, or more than 300 codons more as compared to a predetermined reference sequence.

[0084] Following identification of chemokine receptor binding domains, the chemokine receptor binding domains may be placed in scaffolds as described herein. In some instances, the scaffolds are immunoglobulins. In some instances, the chemokine receptor binding domains are placed in the CDRH3 region. GPCR binding domains that may be placed in scaffolds can also be referred to as a motif. Scaffolds comprising chemokine receptor binding domains may be designed based on binding, specificity, stability, expression, folding, or downstream activity. In some instances, the scaffolds comprising chemokine receptor binding domains enable contact with the chemokine receptor. In some instances, the scaffolds comprising chemokine receptor binding domains enables high affinity binding with the chemokine receptor. An exemplary amino acid sequence of chemokine receptor binding domain is described in Table 1.

TABLE 1
Chemokine amino acid sequences

| SEQ | | |
|---|---|---|
| ID NO | GPCR | Amino Acid Sequence |
| 1 | CXCR4 | MEGISSIPLPLLQIYTSDNYTEEMGSGDYDSMKEPCFREENANFNKIFL |
| | | PTIYSIIFLTGIVGNGLVILVMGYQKKLRSMTDKYRLHLSVADLLFVIT |
| | | LPFWAVDAVANWYFGNFLCKAVHVIYTVNLYSSVLILAFISLDRYLAI |
| | | VHATNSQRPRKLLAEKVVYVGVWIPALLLTIPDFIFANVSEADDRYIC |
| | | DRFYPNDLWVVVFQFQHIMVGLILPGIVILSCYCIIISKLSHSKGHQKR |
| | | KALKTTVILILAFFACWLPYYIGISIDSFILLEIIKQGCEFENTVHKWISIT |
| | | EALAFFHCCLNPILYAFLGAKFKTSAQHALTSVSRGSSLKILSKGKRG |
| | | GHSSVSTESESSSFHSS |
| 2 | CXCR5 | MNYPLTLEMDLENLEDLFWELDRLDNYNDTSLVENHLCPATEGPLM |
| | | ASFKAVFVPVAYSLIFLLGVIGNVLVLVILERHRQTRSSTETFLFHLAV |
| | | ADLLLVFILPFAVAEGSVGWVLGTFLCKTVIALHKVNFYCSSLLLACI |
| | | AVDRYLAIVHAVHAYRHRRLLSIHITCGTIWLVGFLLALPEILFAKVS |
| | | QGHHNNSLPRCTFSQENQAETHAWFTSRFLYHVAGFLLPMLVMGWC |
| | | YVGVVHRLRQAQRRPQRQKAVRVAILVTSIFFLCWSPYHIVIFLDTLA |
| | | RLKAVDNTCKLNGSLPVAITMCEFLGLAHCCLNPMLYTFAGVKFRSD |
| | | LSRLLTKLGCTGPASLCQLFPGWRRSSLSESENATSLTTF |

[0085] Provided herein are scaffolds comprising chemokine receptor binding domains, wherein the sequences of the chemokine receptor binding domains support interaction with chemokine receptor. The sequence may be homologous or identical to a sequence of a chemokine receptor ligand. In some instances, the chemokine receptor binding domain sequence comprises at least or about 70%, 80%, 85%, 90%, 91%, 92%, 93%, 94%, 95%, 96%, 97%, 98%, 99%, or 100% sequence identity to SEQ ID NO: 1 or 2. In some instances, the chemokine receptor binding domain sequence comprises at least or about 95% homology to SEQ ID NO: 1 or 2. In some instances, the chemokine receptor binding domain sequence comprises at least or about 97% homology to SEQ ID NO: 1 or 2. In some instances, the chemokine receptor binding domain sequence comprises at least or about 99% homology to SEQ ID NO: 1 or 2. In some instances, the chemokine receptor binding domain sequence comprises at least or about 100% homology to SEQ ID NO: 1. In some instances, the chemokine receptor binding domain sequence comprises at least a portion having at least or about 10, 20, 30, 40, 50, 60, 70, 80, 90, 100, 110, 120, 130, 140, 150, 160, 170, 180, 190, 200, 210, 220, 230, 240, 250, 260, 270, 280, 290, 300, 310, 320, 330, 340, 350, 360, 370, 380, 390, 400, or more than 400 amino acids of SEQ ID NO: 1 or 2.

[0086] Described herein, in some embodiments, are antibodies or immunoglobulins that bind to the chemokine receptor. In some embodiments, the chemokine receptor is CXCR4. In some embodiments, the chemokine receptor is CXCR5. In some instances, the chemokine receptor antibody or immunoglobulin sequence comprises a heavy chain variable domain comprising at least or about 70%, 80%, 85%, 90%, 91%, 92%, 93%, 94%, 95%, 96%, 97%, 98%, 99%, or 100% sequence identity to any one of SEQ ID NO: 24-28 or 34-356. In some instances, the chemokine receptor antibody or immunoglobulin sequence comprises a heavy chain variable domain comprising at least or about 95% sequence identity to any one of SEQ ID NO: 24-28 or 34-356. In some instances, the chemokine receptor antibody or immunoglobulin sequence comprises a heavy chain variable domain comprising at least or about 97% sequence identity to any one of SEQ ID NO: 24-28 or 34-356. In some instances, the chemokine receptor antibody or immunoglobulin sequence comprises a heavy chain variable domain comprising at least or about 99% sequence identity to any one of SEQ ID NO: 24-28 or 34-356. In some instances, the chemokine receptor antibody or immunoglobulin sequence comprises a heavy chain variable domain comprising at least or about 100% sequence identity to any one of SEQ ID NO: 24-28 or 34-356. In some instances, the chemokine receptor antibody or immunoglobulin sequence comprises a heavy chain variable domain comprising at least a portion having at least or about 1, 2, 3, 4, 5, 6, 7, 8, 9, 10, 12, 14, 16, 18, 20, 30, 40, 50, 60, 70, 80, 90, 100, 110, 120, or more than 120 amino acids of any one of SEQ ID NO: 24-28 or 34-356.

[0087] In some instances, the chemokine receptor antibody or immunoglobulin sequence comprises a heavy chain variable domain comprising at least or about 70%, 80%, 85%, 90%, 91%, 92%, 93%, 94%, 95%, 96%, 97%, 98%, 99%, or 100% sequence identity to any one of SEQ ID NO: 24-28. In some instances, the chemokine receptor antibody or immunoglobulin sequence comprises a heavy chain variable domain comprising at least or about 95% sequence identity to any one of SEQ ID NO: 24-28. In some instances, the chemokine receptor antibody or immunoglobulin sequence comprises a heavy chain variable domain comprising at least or about 97% sequence identity to any one of SEQ ID NO: 24-28. In some instances, the chemokine receptor antibody or immunoglobulin sequence comprises a heavy chain variable domain comprising at least or about 99% sequence identity to any one of SEQ ID NO: 24-28. In some instances, the chemokine receptor antibody or immunoglobulin sequence comprises a heavy chain variable domain comprising at least or about 100% sequence identity to any one of SEQ ID NO: 24-28. In some instances, the chemokine receptor antibody or immunoglobulin sequence comprises a heavy chain variable domain comprising at least a portion having at least or about 1, 2, 3, 4, 5, 6, 7, 8, 9, 10, 12, 14, 16, 18, 20, 30, 40, 50, 60, 70, 80, 90, 100, 110, 120, or more than 120 amino acids of any one of SEQ ID NO: 24-28.

[0088] In some instances, the chemokine receptor antibody or immunoglobulin sequence comprises a heavy chain variable domain comprising at least or about 70%, 80%, 85%, 90%, 91%, 92%, 93%, 94%, 95%, 96%, 97%, 98%, 99%, or 100% sequence identity to any one of SEQ ID NO: 34-356. In some instances, the chemokine receptor antibody or immunoglobulin sequence comprises a heavy chain variable domain comprising at least or about 95% sequence identity to any one of SEQ ID NO: 34-356. In some instances, the chemokine receptor antibody or immunoglobulin sequence comprises a heavy chain variable domain comprising at least or about 97% sequence identity to any one of SEQ ID NO: 34-356. In some instances, the chemokine receptor antibody or immunoglobulin sequence comprises a heavy chain variable domain comprising at least or about 99% sequence identity to any one of SEQ ID NO: 34-356. In some instances, the chemokine receptor antibody or immunoglobulin sequence comprises a heavy chain variable domain comprising at least or about 100% sequence identity to any one of SEQ ID NO: 34-356. In some instances, the chemokine receptor antibody or immunoglobulin sequence comprises a heavy chain variable domain comprising at least a portion having at least or about 1, 2, 3, 4, 5, 6, 7, 8, 9, 10, 12, 14, 16, 18, 20, 30, 40, 50, 60, 70, 80, 90, 100, 110, 120, or more than 120 amino acids of any one of SEQ ID NO: 34-356.

[0089] In some instances, the chemokine receptor antibody or immunoglobulin sequence comprises a light chain variable domain comprising at least or about 70%, 80%, 85%, 90%, 91%, 92%, 93%, 94%, 95%, 96%, 97%, 98%, 99%, or 100% sequence identity to any one of SEQ ID NO: 29-33 or 357-525. In some instances, the chemokine receptor antibody or immunoglobulin sequence comprises a light chain variable domain comprising at least or about 95% sequence identity to any one of SEQ ID NO: 29-33 or 357-525. In some instances, the chemokine receptor antibody or immunoglobulin sequence comprises a light chain variable domain comprising at least or about 97% sequence identity to any one of SEQ ID NO: 29-33 or 357-525. In some instances, the chemokine receptor antibody or immunoglobulin sequence comprises a light chain variable domain comprising at least or about 99% sequence identity to any one of SEQ ID NO: 29-33 or 357-525. In some instances, the chemokine receptor antibody or immunoglobulin sequence comprises a light chain variable domain comprising at least or about 100% sequence identity to any one of SEQ ID NO: 29-33 or 357-525. In some instances, the chemokine receptor antibody or immunoglobulin sequence comprises a light chain variable domain comprising at least a portion having at least or about 1, 2, 3, 4, 5, 6, 7, 8, 9, 10, 12, 14, 16, 18, 20, 30, 40, 50, 60, 70, 80, 90, 100, 110, or more than 110 amino acids of any one of SEQ ID NO: 29-33 or 357-525.

[0090] In some instances, the chemokine receptor antibody or immunoglobulin sequence comprises a light chain variable domain comprising at least or about 70%, 80%, 85%, 90%, 91%, 92%, 93%, 94%, 95%, 96%, 97%, 98%, 99%, or 100% sequence identity to any one of SEQ ID NO: 29-33. In some instances, the chemokine receptor antibody or immunoglobulin sequence comprises a light chain variable domain comprising at least or about 95% sequence identity to any one of SEQ ID NO: 29-33. In some instances, the chemokine receptor antibody or immunoglobulin sequence comprises a light chain variable domain comprising at least or about 97% sequence identity to any one of SEQ ID NO: 29-33. In some instances, the chemokine receptor antibody or immunoglobulin sequence comprises a light chain variable domain comprising at least or about 99% sequence identity to any one of SEQ ID NO: 29-33. In some instances, the chemokine receptor antibody or immunoglobulin sequence comprises a light chain variable domain comprising at least or about 100% sequence identity to any one of SEQ ID NO: 29-33. In some instances, the chemokine receptor antibody or immunoglobulin sequence comprises a light chain variable domain comprising at least a portion having at least or about 1, 2, 3, 4, 5, 6, 7, 8, 9, 10, 12, 14, 16, 18, 20, 30, 40, 50, 60, 70, 80, 90, 100, 110, or more than 110 amino acids of any one of SEQ ID NO: 29-33.

[0091] In some instances, the chemokine receptor antibody or immunoglobulin sequence comprises a light chain variable domain comprising at least or about 70%, 80%, 85%, 90%, 91%, 92%, 93%, 94%, 95%, 96%, 97%, 98%, 99%, or 100% sequence identity to any one of SEQ ID NO: 357-525. In some instances, the chemokine receptor antibody or immunoglobulin sequence comprises a light chain variable domain comprising at least or about 95% sequence identity to any one of SEQ ID NO: 357-525. In some instances, the chemokine receptor antibody or immunoglobulin sequence comprises a light chain variable domain comprising at least or about 97% sequence identity to any one of SEQ ID NO: 357-525. In some instances, the chemokine receptor antibody or immunoglobulin sequence comprises a light chain variable domain comprising at least or about 99% sequence identity to any one of SEQ ID NO: 357-525. In some instances, the chemokine receptor antibody or immunoglobulin sequence comprises a light chain variable domain comprising at least or about 100% sequence identity to any one of SEQ ID NO: 357-525. In some instances, the chemokine receptor antibody or immunoglobulin sequence comprises a light chain variable domain comprising at least a portion having at least or about 1, 2, 3, 4, 5, 6, 7, 8, 9, 10, 12, 14, 16, 18, 20, 30, 40, 50, 60, 70, 80, 90, 100, 110, or more than 110 amino acids of any one of SEQ ID NO: 357-525.

[0092] Described herein, in some embodiments, are antibodies or antibody fragments comprising a variable domain, heavy chain region (VH) and a variable domain, light chain region (VL), wherein the VH comprises an amino acid sequence at least about 90% identical to a sequence as set forth in any one of SEQ ID NOs: 24-28 or 34-356, and wherein the VL comprises an amino acid sequence at least about 90% identical to a sequence as set forth in any one of SEQ ID NOs: 29-33 or 357-525. In some instances, the antibodies or antibody fragments comprise VH comprising at least or about 70%, 80%, 85%, 90%, 91%, 92%, 93%, 94%, 95%, 96%, 97%, 98%, 99%, or 100% sequence identity to any one of SEQ ID NOs: 24-28 or 34-356, and VL comprising at least or about 70%, 80%, 85%, 90%, 91%, 92%, 93%, 94%, 95%, 96%, 97%, 98%, 99%, or 100% sequence identity to any one of SEQ ID NOs: 29-33 or 357-525.

[0093] Described herein, in some embodiments, are antibodies or antibody fragments comprising a variable domain, heavy chain region (VH) and a variable domain, light chain region (VL), wherein the VH comprises an amino acid sequence at least about 90% identical to a sequence as set forth in any one of SEQ ID NOs: 24-28, and wherein the VL comprises an amino acid sequence at least about 90% identical to a sequence as set forth in any one of SEQ ID NOs: 29-33. In some instances, the antibodies or antibody fragments comprise VH comprising at least or about 70%, 80%, 85%, 90%, 91%, 92%, 93%, 94%, 95%, 96%, 97%, 98%, 99%, or 100% sequence identity to any one of SEQ ID NOs: 24-28, and VL comprising at least or about 70%, 80%, 85%, 90%, 91%, 92%, 93%, 94%, 95%, 96%, 97%, 98%, 99%, or 100% sequence identity to any one of SEQ ID NOs: 29-33.

[0094] Described herein, in some embodiments, are antibodies or antibody fragments comprising a variable domain, heavy chain region (VH) and a variable domain, light chain region (VL), wherein the VH comprises an amino acid sequence at least about 90% identical to a sequence as set forth in any one of SEQ ID NOs: 34-356, and wherein the VL comprises an amino acid sequence at least about 90% identical to a sequence as set forth in any one of SEQ ID NOs: 357-525. In some instances, the antibodies or antibody fragments comprise VH comprising at least or about 70%, 80%, 85%, 90%, 91%, 92%, 93%, 94%, 95%, 96%, 97%, 98%, 99%, or 100% sequence identity to any one of SEQ ID NOs: 34-356, and VL comprising at least or about 70%, 80%, 85%, 90%, 91%, 92%, 93%, 94%, 95%, 96%, 97%, 98%, 99%, or 100% sequence identity to any one of SEQ ID NOs: 357-525.

[0095] In some embodiments, the chemokine receptor antibody or immunoglobulin sequence comprises complementarity determining regions (CDRs) comprising at least or about 70%, 80%, 85%, 90%, 91%, 92%, 93%, 94%, 95%, 96%, 97%, 98%, 99%, or 100% sequence identity to any one of SEQ ID NOs: 526-1102. In some instances, the chemokine receptor antibody or immunoglobulin sequence comprises complementarity determining regions (CDRs) comprising at least or about 95% homology to any one of SEQ ID NOs: 526-1102. In some instances, the chemokine receptor antibody or immunoglobulin sequence comprises complementarity determining regions (CDRs) comprising at least or about 97% homology to any one of SEQ ID NOs: 526-1102. In some instances, the chemokine receptor antibody or immunoglobulin sequence comprises complementarity determining regions (CDRs) comprising at least or about 99% homology to any one of SEQ ID NOs: 526-1102. In some instances, the chemokine receptor antibody or immunoglobulin sequence comprises complementarity determining regions (CDRs) comprising at least or about 100% homology to any one of SEQ ID NOs: 526-1102. In some instances, the chemokine receptor antibody or immunoglobulin sequence comprises complementarity determining regions (CDRs) comprising at least a portion having at least or about 3, 4, 5, 6, 7, 8, 9, 10, 12, 14, 16, 17, 18, 19, 20 or more than 20 amino acids of any one of SEQ ID NOs: 526-1102.

[0096] In some embodiments, the chemokine receptor antibody or immunoglobulin sequence comprises a CDRH1 comprising at least or about 70%, 80%, 85%, 90%, 91%, 92%, 93%, 94%, 95%, 96%, 97%, 98%, 99%, or 100% sequence identity to any one of SEQ ID NOs: 526-662. In some instances, the chemokine receptor antibody or immunoglobulin sequence comprises CDRH1 comprising at least or about 95% homology to any one of SEQ ID NO: 526-662. In some instances, the chemokine receptor antibody or immunoglobulin sequence comprises CDRH1 comprising at least or about 97% homology to any one of SEQ ID NO: 526-662. In some instances, the chemokine receptor antibody or immunoglobulin sequence comprises CDRH1 comprising at least or about 99% homology to any one of SEQ ID NO: 526-662. In some instances, the chemokine receptor antibody or immunoglobulin sequence comprises CDRH1 comprising 100% homology to any one of SEQ ID NO: 526-662. In some instances, the chemokine receptor antibody or immunoglobulin sequence comprises CDRH1 comprising at least a portion having at least or about 3, 4, 5, 6, 7, 8, 9, 10, 12, 14, 16, 17, 18, 19, 20, or more than 20 amino acids of any one of SEQ ID NO: 526-662.

[0097] In some embodiments, the chemokine receptor antibody or immunoglobulin sequence comprises a CDRH2 comprising at least or about 70%, 80%, 85%, 90%, 91%, 92%, 93%, 94%, 95%, 96%, 97%, 98%, 99%, or 100% sequence identity to any one of SEQ ID NOs: 663-977. In some instances, the chemokine receptor antibody or immunoglobulin sequence comprises CDRH2 comprising at least or about 95% homology to any one of SEQ ID NO: 663-977. In some instances, the chemokine receptor antibody or immunoglobulin sequence comprises CDRH2 comprising at least or about 97% homology to any one of SEQ ID NO: 663-977. In some instances, the chemokine receptor antibody or immunoglobulin sequence comprises CDRH2 comprising at least or about 99% homology to any one of SEQ ID NO: 663-977. In some instances, the chemokine receptor antibody or immunoglobulin sequence comprises CDRH2 comprising at 100% homology to any one of SEQ ID NO: 663-977. In some instances, the chemokine receptor antibody or immunoglobulin sequence comprises CDRH2 comprising at least a portion having at least or about 3, 4, 5, 6, 7, 8, 9, 10, 12, 14, 16, 17, 18, 19, 20, or more than 20 amino acids of any one of SEQ ID NO: 663-977.

[0098] In some embodiments, the chemokine receptor antibody or immunoglobulin sequence comprises a CDRH3 comprising at least or about 70%, 80%, 85%, 90%, 91%, 92%, 93%, 94%, 95%, 96%, 97%, 98%, 99%, or 100% sequence identity to any one of SEQ ID NOs: 978-1102. In some instances, the chemokine receptor antibody or immunoglobulin sequence comprises CDRH3 comprising at least or about 95% homology to any one of SEQ ID NO: 978-1102. In some instances, the chemokine receptor antibody or immunoglobulin sequence comprises CDRH3 comprising at least or about 97% homology to any one of SEQ ID NO: 978-1102. In some instances, the chemokine receptor antibody or immunoglobulin sequence comprises CDRH3 comprising at least or about 99% homology to any one of SEQ ID NO: 978-1102. In some instances, the chemokine receptor antibody or immunoglobulin sequence comprises CDRH3 comprising 100% homology to any one of SEQ ID NO: 978-1102. In some instances, the chemokine receptor antibody or immunoglobulin sequence comprises CDRH3 comprising at least a portion having at least or about 3, 4, 5, 6, 7, 8, 9, 10, 12, 14, 16, 17, 18, 19, 20, or more than 20 amino acids of any one of SEQ ID NO: 978-1102.

[0099] In some embodiments, the chemokine receptor antibody or immunoglobulin sequence comprises a CDRL1 comprising at least or about 70%, 80%, 85%, 90%, 91%, 92%, 93%, 94%, 95%, 96%, 97%, 98%, 99%, or 100% sequence identity to any one of SEQ ID NOs: 1103-1267. In some instances, the chemokine receptor antibody or immunoglobulin sequence comprises CDRL1 comprising at least or about 95% homology to any one of SEQ ID NO: 1103-1267. In some instances, the chemokine receptor antibody or immunoglobulin sequence comprises CDRL1 comprising at least or about 97% homology to any one of SEQ ID NO: 1103-1267. In some instances, the chemokine receptor antibody or immunoglobulin sequence comprises CDRL1 comprising at least or about 99% homology to any one of SEQ ID NO: 1103-1267. In some instances, the chemokine receptor antibody or immunoglobulin sequence comprises CDRL1 comprising 100% homology to any one of SEQ ID NO: 1103-1267. In some instances, the chemokine receptor antibody or immunoglobulin sequence comprises CDRL1 comprising at least a portion having at least or about 3, 4, 5, 6, 7, 8, 9, 10, 12, 14, 16, 17, 18, 19, 20, or more than 20 amino acids of any one of SEQ ID NO: 1103-1267.

[0100] In some embodiments, the chemokine receptor antibody or immunoglobulin sequence comprises a CDRL2 comprising at least or about 70%, 80%, 85%, 90%, 91%, 92%, 93%, 94%, 95%, 96%, 97%, 98%, 99%, or 100% sequence identity to any one of SEQ ID NOs: 1268-1328. In some instances, the chemokine receptor antibody or immunoglobulin sequence comprises CDRL2 comprising at least or about 95% homology to any one of SEQ ID NO: 1268-1328. In some instances, the chemokine receptor antibody or immunoglobulin sequence comprises CDRL2 comprising at least or about 97% homology to any one of SEQ ID NO: 1268-1328. In some instances, the chemokine receptor antibody or immunoglobulin sequence comprises CDRL2 comprising at least or about 99% homology to any one of SEQ ID NO: 1268-1328. In some instances, the chemokine receptor antibody or immunoglobulin sequence comprises CDRL2 comprising at 100% homology to any one of SEQ ID NO: 1268-1328. In some instances, the chemokine receptor antibody or immunoglobulin sequence comprises CDRL2 comprising at least a portion having at least or about 3, 4, 5, 6, 7, 8, 9, 10, 12, 14, 16, 17, 18, 19, 20, or more than 20 amino acids of any one of SEQ ID NO: 1268-1328.

[0101] In some embodiments, the chemokine receptor antibody or immunoglobulin sequence comprises a CDRL3 comprising at least or about 70%, 80%, 85%, 90%, 91%, 92%, 93%, 94%, 95%, 96%, 97%, 98%, 99%, or 100% sequence identity to any one of SEQ ID NOs: 1329-1493. In some instances, the chemokine receptor antibody or immunoglobulin sequence comprises CDRL3 comprising at least or about 95% homology to any one of SEQ ID NO: 1329-1493. In some instances, the chemokine receptor antibody or immunoglobulin sequence comprises CDRL3 comprising at least or about 97% homology to any one of SEQ ID NO: 1329-1493. In some instances, the chemokine receptor antibody or immunoglobulin sequence comprises CDRL3 comprising at least or about 99% homology to any one of SEQ ID NO: 1329-1493. In some instances, the chemokine receptor antibody or immunoglobulin sequence comprises CDRL3 comprising 100% homology to any one of SEQ ID NO: 1329-1493. In some instances, the chemokine receptor antibody or immunoglobulin sequence comprises CDRL3 comprising at least a portion having at least or about 3, 4, 5, 6, 7, 8, 9, 10, 12, 14, 16, 17, 18, 19, 20, or more than 20 amino acids of any one of SEQ ID NO: 1329-1493.

[0102] In some embodiments, the antibody or antibody fragment comprising a variable domain, heavy chain region (VH) and a variable domain, light chain region (VL), wherein VH comprises complementarity determining regions CDRH1, CDRH2, and CDRH3, wherein VL comprises complementarity determining regions CDRL1, CDRL2, and CDRL3, and wherein (a) an amino acid sequence of CDRH1 is as set forth in any one of SEQ ID NOs: 526-662; (b) an amino acid sequence of CDRH2 is as set forth in any one of SEQ ID NOs: 663-977; (c) an amino acid sequence of CDRH3 is as set forth in any one of SEQ ID NOs: 978-1102; (d) an amino acid sequence of CDRL1 is as set forth in any one of SEQ ID NOs: 1103-1267; (e) an amino acid sequence of CDRL2 is as set forth in any one of SEQ ID NOs: 1268-1328; and (f) an amino acid sequence of CDRL3 is as set forth in any one of SEQ ID NOs: 1329-1493. In some embodiments, the antibody or antibody fragment comprising a variable domain, heavy chain region (VH) and a variable domain, light chain region (VL), wherein VH comprises complementarity determining regions CDRH1, CDRH2, and CDRH3, wherein VL comprises complementarity determining regions CDRL1, CDRL2, and CDRL3, and wherein (a) an amino acid sequence of CDRH1 is at least or about 80%, 85%, 90%, or 95% identical to any one of SEQ ID NOs: 526-662; (b) an amino acid sequence of CDRH2 is at least or about 80%, 85%, 90%, or 95% identical to any one of SEQ ID NOs: 663-977; (c) an amino acid sequence of CDRH3 is at least or about 80%, 85%, 90%, or 95% identical to any one of SEQ ID NOs: 978-1102; (d) an amino acid sequence of CDRL1 is at least or about 80%, 85%, 90%, or 95% identical to any one of SEQ ID NOs: 1103-1267; (e) an amino acid sequence of CDRL2 is at least or about 80%, 85%, 90%, or 95% identical to any one of SEQ ID NOs: 1268-1328; and (f) an amino acid sequence of CDRL3 is at least or about 80%, 85%, 90%, or 95% identical to any one of SEQ ID NOs: 1329-1493.

[0103] In some embodiments, the antibody or antibody fragment comprising a variable domain, heavy chain region (VH) comprising complementarity determining regions CDRH1, CDRH2, and CDRH3, wherein (a) an amino acid sequence of CDRH1 is as set forth in any one of SEQ ID NOs: 526-662; (b) an amino acid sequence of CDRH2 is as set forth in any one of SEQ ID NOs: 663-977; and (c) an amino acid sequence of CDRH3 is as set forth in any one of SEQ ID NOs: 978-1102. In some embodiments, the antibody or antibody fragment comprising a variable domain, heavy chain region (VH) comprising complementarity determining regions CDRH1, CDRH2, and CDRH3, wherein (a) an amino acid sequence of CDRH1 is at least or about 80%, 85%, 90%, or 95% identical to any one of SEQ ID NOs: 526-662; (b) an amino acid sequence of CDRH2 is at least or about 80%, 85%, 90%, or 95% identical to any one of SEQ ID NOs: 663-977; and (c) an amino acid sequence of CDRH3 is at least or about 80%, 85%, 90%, or 95% identical to any one of SEQ ID NOs: 978-1102.

[0104] The term “sequence identity” means that two polynucleotide sequences are identical (i.e., on a nucleotide-by-nucleotide basis) over the window of comparison. The term “percentage of sequence identity” is calculated by comparing two optimally aligned sequences over the window of comparison, determining the number of positions at which the identical nucleic acid base (e.g., A, T, C, G, U, or I) occurs in both sequences to yield the number of matched positions, dividing the number of matched positions by the total number of positions in the window of comparison (i.e., the window size), and multiplying the result by 100 to yield the percentage of sequence identity. Alignment for purposes of determining percent amino acid sequence identity can be achieved in various ways that are within the skill in the art, for instance, using publicly available computer software such as EMBOSS MATCHER, EMBOSS WATER, EMBOSS STRETCHER, EMBOSS NEEDLE, EMBOSS LALIGN, BLAST, BLAST-2, ALIGN or Megalign (DNASTAR) software. Those skilled in the art can determine appropriate parameters for measuring alignment, including any algorithms needed to achieve maximal alignment over the full length of the sequences being compared.

[0105] In situations where ALIGN-2 is employed for amino acid sequence comparisons, the % amino acid sequence identity of a given amino acid sequence A to, with, or against a given amino acid sequence B (which can alternatively be phrased as a given amino acid sequence A that has or comprises a certain % amino acid sequence identity to, with, or against a given amino acid sequence B) is calculated as follows: 100 times the fraction X/Y, where X is the number of amino acid residues scored as identical matches by the sequence alignment program ALIGN-2 in that program's alignment of A and B, and where Y is the total number of amino acid residues in B. It will be appreciated that where the length of amino acid sequence A is not equal to the length of amino acid sequence B, the % amino acid sequence identity of A to B will not equal the % amino acid sequence identity of B to A. Unless specifically stated otherwise, all % amino acid sequence identity values used herein are obtained as described in the immediately preceding paragraph using the ALIGN-2 computer program.

[0106] The term “homology” or “similarity” between two proteins is determined by comparing the amino acid sequence and its conserved amino acid substitutes of one protein sequence to the second protein sequence. Similarity may be determined by procedures which are well-known in the art, for example, a BLAST program (Basic Local Alignment Search Tool at the National Center for Biological Information).

[0107] The terms “complementarity determining region,” and “CDR,” which are synonymous with “hypervariable region” or “HVR,” are known in the art to refer to non-contiguous sequences of amino acids within antibody variable regions, which confer antigen specificity and/or binding affinity. In general, there are three CDRs in each heavy chain variable region (CDRH1, CDRH2, CDRH3) and three CDRs in each light chain variable region (CDRL1, CDRL2, CDRL3). “Framework regions” and “FR” are known in the art to refer to the non-CDR portions of the variable regions of the heavy and light chains. In general, there are four FRs in each full-length heavy chain variable region (FR-H1, FR-H2, FR-H3, and FR-H4), and four FRs in each full-length light chain variable region (FR-L1, FR-L2, FR-L3, and FR-L4). The precise amino acid sequence boundaries of a given CDR or FR can be readily determined using any of a number of well-known schemes, including those described by Kabat et al. (1991), “Sequences of Proteins of Immunological Interest,” 5th Ed. Public Health Service, National Institutes of Health, Bethesda, Md. (“Kabat” numbering scheme), Al-Lazikani et al., (1997) JMB 273,927-948 (“Chothia” numbering scheme); MacCallum et al., J. Mol. Biol. 262:732-745 (1996), “Antibody-antigen interactions: Contact analysis and binding site topography,” J. Mol. Biol. 262, 732-745.” (“Contact” numbering scheme); Lefranc M P et al., “IMGT unique numbering for immunoglobulin and T cell receptor variable domains and Ig superfamily V-like domains,” Dev Comp Immunol, 2003 January; 27(1):55-77 (“IMGT” numbering scheme); Honegger A and Plückthun A, “Yet another numbering scheme for immunoglobulin variable domains: an automatic modeling and analysis tool,” J Mol Biol, 2001 Jun. 8; 309(3):657-70, (“Aho” numbering scheme); and Whitelegg NR and Rees AR, “WAM: an improved algorithm for modelling antibodies on the WEB,” Protein Eng. 2000 December; 13(12):819-24 (“AbM” numbering scheme. In certain embodiments the CDRs of the antibodies described herein can be defined by a method selected from Kabat, Chothia, IMGT, Aho, AbM, or combinations thereof.

[0108] The boundaries of a given CDR or FR may vary depending on the scheme used for identification. For example, the Kabat scheme is based on structural alignments, while the Chothia scheme is based on structural information. Numbering for both the Kabat and Chothia schemes is based upon the most common antibody region sequence lengths, with insertions accommodated by insertion letters, for example, “30a,” and deletions appearing in some antibodies. The two schemes place certain insertions and deletions (“indels”) at different positions, resulting in differential numbering. The Contact scheme is based on analysis of complex crystal structures and is similar in many respects to the Chothia numbering scheme.

[0109] Provided herein are chemokine receptor binding libraries comprising nucleic acids encoding for scaffolds comprising chemokine receptor binding domains comprise variation in domain type, domain length, or residue variation. In some instances, the domain is a region in the scaffold comprising the chemokine receptor binding domains. For example, the region is the VH, CDRH3, or VL domain. In some instances, the domain is the chemokine receptor binding domain.

[0110] Methods described herein provide for synthesis of a chemokine receptor binding library of nucleic acids each encoding for a predetermined variant of at least one predetermined reference nucleic acid sequence. In some cases, the predetermined reference sequence is a nucleic acid sequence encoding for a protein, and the variant library comprises sequences encoding for variation of at least a single codon such that a plurality of different variants of a single residue in the subsequent protein encoded by the synthesized nucleic acid are generated by standard translation processes. In some instances, the chemokine receptor binding library comprises varied nucleic acids collectively encoding variations at multiple positions. In some instances, the variant library comprises sequences encoding for variation of at least a single codon of a VH, CDRH3, or VL domain. In some instances, the variant library comprises sequences encoding for variation of at least a single codon in a chemokine receptor binding domain. For example, at least one single codon of a chemokine receptor binding domain as listed in Table 1 is varied. In some instances, the variant library comprises sequences encoding for variation of multiple codons of a VH, CDRH3, or VL domain. In some instances, the variant library comprises sequences encoding for variation of multiple codons in a chemokine receptor binding domain. An exemplary number of codons for variation include, but are not limited to, at least or about 1, 5, 10, 15, 20, 25, 30, 35, 40, 45, 50, 55, 60, 65, 70, 75, 80, 85, 90, 95, 100, 125, 150, 175, 225, 250, 275, 300, or more than 300 codons.

[0111] Methods described herein provide for synthesis of a chemokine receptor binding library of nucleic acids each encoding for a predetermined variant of at least one predetermined reference nucleic acid sequence, wherein the chemokine receptor binding library comprises sequences encoding for variation of length of a domain. In some instances, the domain is VH, CDRH3, or VL domain. In some instances, the domain is the chemokine receptor binding domain. In some instances, the library comprises sequences encoding for variation of length of at least or about 1, 5, 10, 15, 20, 25, 30, 35, 40, 45, 50, 55, 60, 65, 70, 75, 80, 85, 90, 95, 100, 125, 150, 175, 225, 250, 275, 300, or more than 300 codons less as compared to a predetermined reference sequence. In some instances, the library comprises sequences encoding for variation of length of at least or about 1, 5, 10, 15, 20, 25, 30, 35, 40, 45, 50, 55, 60, 65, 70, 75, 80, 85, 90, 95, 100, 125, 150, 175, 200, 225, 250, 275, 300, or more than 300 codons more as compared to a predetermined reference sequence.

[0112] Provided herein are chemokine receptor binding libraries comprising nucleic acids encoding for scaffolds comprising chemokine receptor binding domains, wherein the chemokine receptor binding libraries are synthesized with various numbers of fragments. In some instances, the fragments comprise the VH, CDRH3, or VL domain. In some instances, the chemokine receptor binding libraries are synthesized with at least or about 2 fragments, 3 fragments, 4 fragments, 5 fragments, or more than 5 fragments. The length of each of the nucleic acid fragments or average length of the nucleic acids synthesized may be at least or about 50, 75, 100, 125, 150, 175, 200, 225, 250, 275, 300, 325, 350, 375, 400, 425, 450, 475, 500, 525, 550, 575, 600, or more than 600 base pairs. In some instances, the length is about 50 to 600, 75 to 575, 100 to 550, 125 to 525, 150 to 500, 175 to 475, 200 to 450, 225 to 425, 250 to 400, 275 to 375, or 300 to 350 base pairs.

[0113] chemokine receptor binding libraries comprising nucleic acids encoding for scaffolds comprising chemokine receptor binding domains as described herein comprise various lengths of amino acids when translated. In some instances, the length of each of the amino acid fragments or average length of the amino acid synthesized may be at least or about 15, 20, 25, 30, 35, 40, 45, 50, 55, 60, 65, 70, 75, 80, 85, 90, 95, 100, 105, 110, 115, 120, 125, 130, 135, 140, 145, 150, or more than 150 amino acids. In some instances, the length of the amino acid is about 15 to 150, 20 to 145, 25 to 140, 30 to 135, 35 to 130, 40 to 125, 45 to 120, 50 to 115, 55 to 110, 60 to 110, 65 to 105, 70 to 100, or 75 to 95 amino acids. In some instances, the length of the amino acid is about 22 to about 75 amino acids.

[0114] chemokine receptor binding libraries comprising de novo synthesized variant sequences encoding for scaffolds comprising chemokine receptor binding domains comprise a number of variant sequences. In some instances, a number of variant sequences is de novo synthesized for a CDRH1, CDRH2, CDRH3, CDRL1, CDRL2, CDRL3, VL, VH, or a combination thereof. In some instances, a number of variant sequences is de novo synthesized for framework element 1 (FW1), framework element 2 (FW2), framework element 3 (FW3), or framework element 4 (FW4). In some instances, a number of variant sequences is de novo synthesized for a GPCR binding domain. For example, the number of variant sequences is about 1 to about 10 sequences for the VH domain, about 10⁸ sequences for the chemokine receptor binding domain, and about 1 to about 44 sequences for the VK domain. The number of variant sequences may be at least or about 5, 10, 15, 20, 25, 30, 35, 40, 45, 50, 55, 60, 65, 70, 75, 80, 85, 90, 95, 100, 125, 150, 175, 200, 225, 250, 275, 300, 325, 350, 375, 400, 425, 450, 475, 500, or more than 500 sequences. In some instances, the number of variant sequences is about 10 to 300, 25 to 275, 50 to 250, 75 to 225, 100 to 200, or 125 to 150 sequences.

[0115] chemokine receptor binding libraries comprising de novo synthesized variant sequences encoding for scaffolds comprising chemokine receptor binding domains comprise improved diversity. For example, variants are generated by placing chemokine receptor binding domain variants in immunoglobulin scaffold variants comprising N-terminal CDRH3 variations and C-terminal CDRH3 variations. In some instances, variants include affinity maturation variants. Alternatively or in combination, variants include variants in other regions of the immunoglobulin including, but not limited to, CDRH1, CDRH2, CDRL1, CDRL2, and CDRL3. In some instances, the number of variants of the chemokine receptor binding libraries is least or about 10⁴, 10⁵, 10⁶, 10⁷, 10⁸, 10⁹, 10¹⁰, 10¹¹, 10¹², 10¹³, 10¹⁴, 10¹⁵, 10¹⁶, 10¹⁷, 10¹⁸, 10¹⁹, 10²⁰, or more than 10²⁰ non-identical sequences. For example, a library comprising about 10 variant sequences for a VH region, about 237 variant sequences for a CDRH3 region, and about 43 variant sequences for a VL and CDRL3 region comprises 10⁵ non-identical sequences (10×237×43).

[0116] Provided herein are libraries comprising nucleic acids encoding for a chemokine receptor antibody comprising variation in at least one region of the antibody, wherein the region is the CDR region. In some instances, the chemokine receptor antibody is a single domain antibody comprising one heavy chain variable domain such as a VHH antibody. In some instances, the VHH antibody comprises variation in one or more CDR regions. In some instances, libraries described herein comprise at least or about 1, 10, 20, 30, 40, 50, 60, 70, 80, 90, 100, 200, 300, 400, 500, 600, 700, 800, 900, 1000, 1200, 1400, 1600, 1800, 2000, 2400, 2600, 2800, 3000, or more than 3000 sequences of a CDR1, CDR2, or CDR3. In some instances, libraries described herein comprise at least or about 10⁴, 10⁵, 10⁶, 10⁷, 10⁸, 10⁹, 10¹⁰, 10¹¹, 10¹², 10¹³, 10¹⁴, 10¹⁵, 10¹⁶, 10¹⁷, 10¹⁸, 10¹⁹, 10²⁰, or more than 10²⁰ sequences of a CDR1, CDR2, or CDR3. For example, the libraries comprise at least 2000 sequences of a CDR1, at least 1200 sequences for CDR2, and at least 1600 sequences for CDR3. In some instances, each sequence is non-identical.

[0117] In some instances, the CDR1, CDR2, or CDR3 is of a variable domain, light chain (VL). CDR1, CDR2, or CDR3 of a variable domain, light chain (VL) can be referred to as CDRL1, CDRL2, or CDRL3, respectively. In some instances, libraries described herein comprise at least or about 1, 2, 3, 4, 5, 6, 7, 8, 9, 10, 20, 30, 40, 50, 60, 70, 80, 90, 100, 200, 300, 400, 500, 600, 700, 800, 900, 1000, 1200, 1400, 1600, 1800, 2000, 2400, 2600, 2800, 3000, or more than 3000 sequences of a CDR1, CDR2, or CDR3 of the VL. In some instances, libraries described herein comprise at least or about 10⁴, 10⁵, 10⁶, 10⁷, 10⁸, 10⁹, 10¹⁰, 10¹¹, 10¹², 10¹³, 10¹⁴, 10¹⁵, 10¹⁶, 10¹⁷, 10¹⁸, 10¹⁹, 10²⁰, or more than 10²⁰ sequences of a CDR1, CDR2, or CDR3 of the VL. For example, the libraries comprise at least 20 sequences of a CDR1 of the VL, at least 4 sequences of a CDR2 of the VL, and at least 140 sequences of a CDR3 of the VL. In some instances, the libraries comprise at least 2 sequences of a CDR1 of the VL, at least 1 sequence of CDR2 of the VL, and at least 3000 sequences of a CDR3 of the VL. In some instances, the VL is IGKV1-39, IGKV1-9, IGKV2-28, IGKV3-11, IGKV3-15, IGKV3-20, IGKV4-1, IGLV1-51, IGLV2-14, IGLV1-40, or IGLV3-1. In some instances, the VL is IGKV2-28. In some instances, the VL is IGLV1-51.

[0118] In some instances, the CDR1, CDR2, or CDR3 is of a variable domain, heavy chain (VH). CDR1, CDR2, or CDR3 of a variable domain, heavy chain (VH) can be referred to as CDRH1, CDRH2, or CDRH3, respectively. In some instances, libraries described herein comprise at least or about 1, 2, 3, 4, 5, 6, 7, 8, 9, 10, 20, 30, 40, 50, 60, 70, 80, 90, 100, 200, 300, 400, 500, 600, 700, 800, 900, 1000, 1200, 1400, 1600, 1800, 2000, 2400, 2600, 2800, 3000, or more than 3000 sequences of a CDR1, CDR2, or CDR3 of the VH. In some instances, libraries described herein comprise at least or about 10⁴, 10⁵, 10⁶, 10⁷, 10⁸, 10⁹, 10¹⁰, 10¹¹, 10¹², 10¹³, 10¹⁴, 10¹⁵, 10¹⁶, 10¹⁷, 10¹⁸, 10¹⁹, 10²⁰, or more than 10²⁰ sequences of a CDR1, CDR2, or CDR3 of the VH. For example, the libraries comprise at least 30 sequences of a CDR1 of the VH, at least 570 sequences of a CDR2 of the VH, and at least 10⁸ sequences of a CDR3 of the VH. In some instances, the libraries comprise at least 30 sequences of a CDR1 of the VH, at least 860 sequences of a CDR2 of the VH, and at least 10⁷ sequences of a CDR3 of the VH. In some instances, the VH is IGHV1-18, IGHV1-69, IGHV1-8 IGHV3-21, IGHV3-23, IGHV3-30/33m, IGHV3-28, IGHV3-74, IGHV4-39, or IGHV4-59/61. In some instances, the VH is IGHV1-69, IGHV3-30, IGHV3-23, IGHV3, IGHV1-46, IGHV3-7, IGHV1, or IGHV1-8. In some instances, the VH is IGHV1-69 or IGHV3-30. In some instances, the VH is IGHV3-23.

[0119] Libraries as described herein, in some embodiments, comprise varying lengths of a CDRL1, CDRL2, CDRL3, CDRH1, CDRH2, or CDRH3. In some instances, the length of the CDRL1, CDRL2, CDRL3, CDRH1, CDRH2, or CDRH3 comprises at least or about 5, 6, 7, 8, 9, 10, 11, 12, 13, 14, 15, 16, 17, 18, 19, 20, 21, 22, 23, 24, 25, 26, 27, 28, 29, 30, 40, 50, 60, 70, 80, 90, or more than 90 amino acids in length. For example, the CDRH3 comprises at least or about 12, 15, 16, 17, 20, 21, or 23 amino acids in length. In some instances, the CDRL1, CDRL2, CDRL3, CDRH1, CDRH2, or CDRH3 comprises a range of about 1 to about 10, about 5 to about 15, about 10 to about 20, or about 15 to about 30 amino acids in length.

[0120] Libraries comprising nucleic acids encoding for antibodies having variant CDR sequences as described herein comprise various lengths of amino acids when translated. In some instances, the length of each of the amino acid fragments or average length of the amino acid synthesized may be at least or about 15, 20, 25, 30, 35, 40, 45, 50, 55, 60, 65, 70, 75, 80, 85, 90, 95, 100, 105, 110, 115, 120, 125, 130, 135, 140, 145, 150, or more than 150 amino acids. In some instances, the length of the amino acid is about 15 to 150, 20 to 145, 25 to 140, 30 to 135, 35 to 130, 40 to 125, 45 to 120, 50 to 115, 55 to 110, 60 to 110, 65 to 105, 70 to 100, or 75 to 95 amino acids. In some instances, the length of the amino acid is about 22 amino acids to about 75 amino acids. In some instances, the antibodies comprise at least or about 100, 200, 300, 400, 500, 600, 700, 800, 900, 1000, 2000, 3000, 4000, 5000, or more than 5000 amino acids.

[0121] Ratios of the lengths of a CDRL1, CDRL2, CDRL3, CDRH1, CDRH2, or CDRH3 may vary in libraries described herein. In some instances, a CDRL1, CDRL2, CDRL3, CDRH1, CDRH2, or CDRH3 comprising at least or about 5, 6, 7, 8, 9, 10, 11, 12, 13, 14, 15, 16, 17, 18, 19, 20, 21, 22, 23, 24, 25, 26, 27, 28, 29, 30, 40, 50, 60, 70, 80, 90, or more than 90 amino acids in length comprises about 10%, 20%, 30%, 40%, 50%, 60%, 70%, 80%, 90%, or more than 90% of the library. For example, a CDRH3 comprising about 23 amino acids in length is present in the library at 40%, a CDRH3 comprising about 21 amino acids in length is present in the library at 30%, a CDRH3 comprising about 17 amino acids in length is present in the library at 20%, and a CDRH3 comprising about 12 amino acids in length is present in the library at 10%. In some instances, a CDRH3 comprising about 20 amino acids in length is present in the library at 40%, a CDRH3 comprising about 16 amino acids in length is present in the library at 30%, a CDRH3 comprising about 15 amino acids in length is present in the library at 20%, and a CDRH3 comprising about 12 amino acids in length is present in the library at 10%.

[0122] Libraries as described herein encoding for a VHH antibody comprise variant CDR sequences that are shuffled to generate a library with a theoretical diversity of at least or about 10⁷, 10⁸, 10⁹, 10¹⁰, 10¹¹, 10¹², 10¹³, 10¹⁴, 10¹⁵, 10¹⁶, 10¹⁷, 10¹⁸, 10¹⁹, 10²⁰, or more than 10²⁰ sequences. In some instances, the library has a final library diversity of at least or about 10⁷, 10⁸, 10⁹, 10¹⁰, 10¹¹, 10¹², 10¹³, 10¹⁴, 10¹⁵, 10¹⁶, 10¹⁷, 10¹⁸, 10¹⁹, 10²⁰, or more than 10²⁰ sequences.

[0123] Provided herein are chemokine receptor binding libraries encoding for an immunoglobulin. In some instances, the chemokine receptor immunoglobulin is an antibody. In some instances, the chemokine receptor immunoglobulin is a VHH antibody. In some instances, the chemokine receptor immunoglobulin comprises a binding affinity (e.g., K_{D}) to chemokine receptor of less than 1 nM, less than 1.2 nM, less than 2 nM, less than 5 nM, less than 10 nM, less than 11 nm, less than 13.5 nM, less than 15 nM, less than 20 nM, less than 25 nM, or less than 30 nM. In some instances, the chemokine receptor immunoglobulin comprises a K_{D} of less than 1 nM. In some instances, the chemokine receptor immunoglobulin comprises a K_{D} of less than 1.2 nM. In some instances, the chemokine receptor immunoglobulin comprises a K_{D} of less than 2 nM. In some instances, the chemokine receptor immunoglobulin comprises a K_{D} of less than 5 nM. In some instances, the chemokine receptor immunoglobulin comprises a K_{D} of less than 10 nM. In some instances, the chemokine receptor immunoglobulin comprises a K_{D} of less than 13.5 nM. In some instances, the chemokine receptor immunoglobulin comprises a K_{D} of less than 15 nM. In some instances, the chemokine receptor immunoglobulin comprises a K_{D} of less than 20 nM. In some instances, the chemokine receptor immunoglobulin comprises a K_{D} of less than 25 nM. In some instances, the chemokine receptor immunoglobulin comprises a K_{D} of less than 30 nM.

[0124] In some instances, the chemokine receptor immunoglobulin is a chemokine receptor agonist. In some instances, the chemokine receptor immunoglobulin is a chemokine receptor antagonist. In some instances, the chemokine receptor immunoglobulin is a chemokine receptor allosteric modulator. In some instances, the allosteric modulator is a negative allosteric modulator. In some instances, the allosteric modulator is a positive allosteric modulator. In some instances, the chemokine receptor immunoglobulin results in agonistic, antagonistic, or allosteric effects at a concentration of at least or about 1 nM, 2 nM, 4 nM, 6 nM, 8 nM, 10 nM, 20 nM, 30 nM, 40 nM, 50 nM, 60 nM, 70 nM, 80 nM, 90 nM, 100 nM, 120 nM, 140 nM, 160 nM, 180 nM, 200 nM, 300 nM, 400 nM, 500 nM, 600 nM, 700 nM, 800 nM, 900 nM, 1000 nM, or more than 1000 nM. In some instances, the chemokine receptor immunoglobulin is a negative allosteric modulator. In some instances, the chemokine receptor immunoglobulin is a negative allosteric modulator at a concentration of at least or about 0.001, 0.005, 0.01, 0.05, 0.1, 0.5, 1 nM, 2 nM, 4 nM, 6 nM, 8 nM, 10 nM, 20 nM, 30 nM, 40 nM, 50 nM, 60 nM, 70 nM, 80 nM, 90 nM, 100 nM, or more than 100 nM. In some instances, the chemokine receptor immunoglobulin is a negative allosteric modulator at a concentration in a range of about 0.001 to about 100, 0.01 to about 90, about 0.1 to about 80, 1 to about 50, about 10 to about 40 nM, or about 1 to about 10 nM. In some instances, the chemokine receptor immunoglobulin comprises an EC50 or IC50 of at least or about 0.001, 0.0025, 0.005, 0.01, 0.025, 0.05, 0.06, 0.07, 0.08, 0.9, 0.1, 0.5, 1, 2, 3, 4, 5, 6, or more than 6 nM. In some instances, the chemokine receptor immunoglobulin comprises an EC50 or IC50 of at least or about 1 nM, 2 nM, 4 nM, 6 nM, 8 nM, 10 nM, 20 nM, 30 nM, 40 nM, 50 nM, 60 nM, 70 nM, 80 nM, 90 nM, 100 nM, or more than 100 nM.

[0125] Provided herein are chemokine receptor binding libraries encoding for an immunoglobulin, wherein the immunoglobulin comprises a long half-life. In some instances, the half-life of the chemokine receptor immunoglobulin is at least or about 12 hours, 24 hours 36 hours, 48 hours, 60 hours, 72 hours, 84 hours, 96 hours, 108 hours, 120 hours, 140 hours, 160 hours, 180 hours, 200 hours, or more than 200 hours. In some instances, the half-life of the chemokine receptor immunoglobulin is in a range of about 12 hours to about 300 hours, about 20 hours to about 280 hours, about 40 hours to about 240 hours, or about 60 hours to about 200 hours.

[0126] chemokine receptor immunoglobulins as described herein may comprise improved properties. In some instances, the chemokine receptor immunoglobulins are monomeric. In some instances, the chemokine receptor immunoglobulins are not prone to aggregation. In some instances, at least or about 70%, 75%, 80%, 85%, 90%, 95%, or 99% of the chemokine receptor immunoglobulins are monomeric. In some instances, the chemokine receptor immunoglobulins are thermostable. In some instances, the chemokine receptor immunoglobulins result in reduced non-specific binding.

[0127] Following synthesis of chemokine receptor binding libraries comprising nucleic acids encoding scaffolds comprising chemokine receptor binding domains, libraries may be used for screening and analysis. For example, libraries are assayed for library displayability and panning. In some instances, displayability is assayed using a selectable tag. Exemplary tags include, but are not limited to, a radioactive label, a fluorescent label, an enzyme, a chemiluminescent tag, a colorimetric tag, an affinity tag or other labels or tags that are known in the art. In some instances, the tag is histidine, polyhistidine, myc, hemagglutinin (HA), or FLAG. In some instances, the chemokine receptor binding libraries comprises nucleic acids encoding scaffolds comprising GPCR binding domains with multiple tags such as GFP, FLAG, and Lucy as well as a DNA barcode. In some instances, libraries are assayed by sequencing using various methods including, but not limited to, single-molecule real-time (SMRT) sequencing, Polony sequencing, sequencing by ligation, reversible terminator sequencing, proton detection sequencing, ion semiconductor sequencing, nanopore sequencing, electronic sequencing, pyrosequencing, Maxam-Gilbert sequencing, chain termination (e.g., Sanger) sequencing, +S sequencing, or sequencing by synthesis.

[0128] Expression Systems

[0129] Provided herein are libraries comprising nucleic acids encoding for scaffolds comprising chemokine receptor binding domains, wherein the libraries have improved specificity, stability, expression, folding, or downstream activity. In some instances, libraries described herein are used for screening and analysis.

[0130] Provided herein are libraries comprising nucleic acids encoding for scaffolds comprising chemokine receptor binding domains, wherein the nucleic acid libraries are used for screening and analysis. In some instances, screening and analysis comprises in vitro, in vivo, or ex vivo assays. Cells for screening include primary cells taken from living subjects or cell lines. Cells may be from prokaryotes (e.g., bacteria and fungi) or eukaryotes (e.g., animals and plants). Exemplary animal cells include, without limitation, those from a mouse, rabbit, primate, and insect. In some instances, cells for screening include a cell line including, but not limited to, Chinese Hamster Ovary (CHO) cell line, human embryonic kidney (HEK) cell line, or baby hamster kidney (BHK) cell line. In some instances, nucleic acid libraries described herein may also be delivered to a multicellular organism. Exemplary multicellular organisms include, without limitation, a plant, a mouse, rabbit, primate, and insect.

[0131] Nucleic acid libraries or protein libraries encoded thereof described herein may be screened for various pharmacological or pharmacokinetic properties. In some instances, the libraries are screened using in vitro assays, in vivo assays, or ex vivo assays. For example, in vitro pharmacological or pharmacokinetic properties that are screened include, but are not limited to, binding affinity, binding specificity, and binding avidity. Exemplary in vivo pharmacological or pharmacokinetic properties of libraries described herein that are screened include, but are not limited to, therapeutic efficacy, activity, preclinical toxicity properties, clinical efficacy properties, clinical toxicity properties, immunogenicity, potency, and clinical safety properties.

[0132] Pharmacological or pharmacokinetic properties that may be screened include, but are not limited to, cell binding affinity and cell activity. For example, cell binding affinity assays or cell activity assays are performed to determine agonistic, antagonistic, or allosteric effects of libraries described herein. In some instances, the cell activity assay is a cAMP assay. In some instances, libraries as described herein are compared to cell binding or cell activity of ligands of chemokine receptor.

[0133] Libraries as described herein may be screened in cell based assays or in non-cell based assays. Examples of non-cell based assays include, but are not limited to, using viral particles, using in vitro translation proteins, and using protealiposomes with chemokine receptor.

[0134] Nucleic acid libraries as described herein may be screened by sequencing. In some instances, next generation sequence is used to determine sequence enrichment of chemokine receptor binding variants. In some instances, V gene distribution, J gene distribution, V gene family, CDR3 counts per length, or a combination thereof is determined. In some instances, clonal frequency, clonal accumulation, lineage accumulation, or a combination thereof is determined. In some instances, number of sequences, sequences with VH clones, clones, clones greater than 1, clonotypes, clonotypes greater than 1, lineages, simpsons, or a combination thereof is determined. In some instances, a percentage of non-identical CDR3s is determined. For example, the percentage of non-identical CDR3s is calculated as the number of non-identical CDR3s in a sample divided by the total number of sequences that had a CDR3 in the sample.

[0135] Provided herein are nucleic acid libraries, wherein the nucleic acid libraries may be expressed in a vector. Expression vectors for inserting nucleic acid libraries disclosed herein may comprise eukaryotic or prokaryotic expression vectors. Exemplary expression vectors include, without limitation, mammalian expression vectors: pSF-CMV-NEO-NH2-PPT-3XFLAG, pSF-CMV-NEO—COOH-3XFLAG, pSF-CMV—PURO-NH2-GST-TEV, pSF-OXB20-COOH-TEV-FLAG(R)-6His, pCEP4 pDEST27, pSF-CMV-Ub-KrYFP, pSF-CMV-FMDV-daGFP, pEF1a-mCherry-N1 Vector, pEF1a-tdTomato Vector, pSF-CMV-FMDV-Hygro, pSF-CMV-PGK-Puro, pMCP-tag(m), and pSF-CMV—PURO-NH2-CMYC; bacterial expression vectors: pSF-OXB20-BetaGal,pSF-OXB20-Fluc, pSF-OXB20, and pSF-Tac; plant expression vectors: pRI 101-AN DNA and pCambia2301; and yeast expression vectors: pTYB21 and pKLAC2, and insect vectors: pAc5.1/V5-His A and pDEST8. In some instances, the vector is pcDNA3 or pcDNA3.1.

[0136] Described herein are nucleic acid libraries that are expressed in a vector to generate a construct comprising a scaffold comprising sequences of chemokine receptor binding domains. In some instances, a size of the construct varies. In some instances, the construct comprises at least or about 500, 600, 700, 800, 900, 1000, 1100, 1300, 1400, 1500, 1600, 1700, 1800, 2000, 2400, 2600, 2800, 3000, 3200, 3400, 3600, 3800, 4000, 4200, 4400, 4600, 4800, 5000, 6000, 7000, 8000, 9000, 10000, or more than 10000 bases. In some instances, a the construct comprises a range of about 300 to 1,000, 300 to 2,000, 300 to 3,000, 300 to 4,000, 300 to 5,000, 300 to 6,000, 300 to 7,000, 300 to 8,000, 300 to 9,000, 300 to 10,000, 1,000 to 2,000, 1,000 to 3,000, 1,000 to 4,000, 1,000 to 5,000, 1,000 to 6,000, 1,000 to 7,000, 1,000 to 8,000, 1,000 to 9,000, 1,000 to 10,000, 2,000 to 3,000, 2,000 to 4,000, 2,000 to 5,000, 2,000 to 6,000, 2,000 to 7,000, 2,000 to 8,000, 2,000 to 9,000, 2,000 to 10,000, 3,000 to 4,000, 3,000 to 5,000, 3,000 to 6,000, 3,000 to 7,000, 3,000 to 8,000, 3,000 to 9,000, 3,000 to 10,000, 4,000 to 5,000, 4,000 to 6,000, 4,000 to 7,000, 4,000 to 8,000, 4,000 to 9,000, 4,000 to 10,000, 5,000 to 6,000, 5,000 to 7,000, 5,000 to 8,000, 5,000 to 9,000, 5,000 to 10,000, 6,000 to 7,000, 6,000 to 8,000, 6,000 to 9,000, 6,000 to 10,000, 7,000 to 8,000, 7,000 to 9,000, 7,000 to 10,000, 8,000 to 9,000, 8,000 to 10,000, or 9,000 to 10,000 bases.

[0137] Provided herein are libraries comprising nucleic acids encoding for scaffolds comprising GPCR binding domains, wherein the nucleic acid libraries are expressed in a cell. In some instances, the libraries are synthesized to express a reporter gene. Exemplary reporter genes include, but are not limited to, acetohydroxyacid synthase (AHAS), alkaline phosphatase (AP), beta galactosidase (LacZ), beta glucoronidase (GUS), chloramphenicol acetyltransferase (CAT), green fluorescent protein (GFP), red fluorescent protein (RFP), yellow fluorescent protein (YFP), cyan fluorescent protein (CFP), cerulean fluorescent protein, citrine fluorescent protein, orange fluorescent protein, cherry fluorescent protein, turquoise fluorescent protein, blue fluorescent protein, horseradish peroxidase (HRP), luciferase (Luc), nopaline synthase (NOS), octopine synthase (OCS), luciferase, and derivatives thereof. Methods to determine modulation of a reporter gene are well known in the art, and include, but are not limited to, fluorometric methods (e.g. fluorescence spectroscopy, Fluorescence Activated Cell Sorting (FACS), fluorescence microscopy), and antibiotic resistance determination.

[0138] Diseases and Disorders

[0139] Provided herein are chemokine receptor binding libraries comprising nucleic acids encoding for scaffolds comprising chemokine receptor binding domains that may have therapeutic effects. In some instances, the chemokine receptor binding libraries result in protein when translated that is used to treat a disease or disorder. In some instances, the protein is an immunoglobulin. In some instances, the protein is a peptidomimetic.

[0140] Chemokine receptor libraries as described herein may comprise modulators of chemokine receptor. In some instances, the chemokine receptor modulator is an inhibitor. In some instances, the chemokine receptor modulator is an activator. In some instances, the chemokine receptor inhibitor is a chemokine receptor antagonist. Modulators of chemokine receptors, in some instances, are used for treating various diseases or disorders.

[0141] Exemplary diseases include, but are not limited to, cancer, inflammatory diseases or disorders, a metabolic disease or disorder, a cardiovascular disease or disorder, a respiratory disease or disorder, pain, a digestive disease or disorder, a reproductive disease or disorder, an endocrine disease or disorder, or a neurological disease or disorder. In some instances, the cancer is a solid cancer or a hematologic cancer. In some instances, the cancer is gastric cancer, breast cancer, colorectal cancer, lung cancer, prostate cancer, hepatocellular carcinoma, leukemia, or lymphoma. In some instances, the cancer is B-cell non-Hodgkin lymphoma. In some instances, the disease or disorder is caused by a virus. In some instances, the disease or disorder is caused by human immunodeficiency virus (HIV).

[0142] In some instances, the chemokine receptor modulator is involved in immune surveillance. In some instances, the chemokine receptor modulator is involved in T cell entry by a virus. In some instances, the chemokine receptor modulator is involved in diseases or disorders affecting homeostasis. In some instances, the chemokine receptor modulator is involved in disease or disorders relating to hematopoietic stem cell migration.

[0143] Described herein, in some embodiments, are antibodies or antibody fragment thereof that binds chemokine receptor for use in diagnosing or establishing a disease or disorder in a subject. In some embodiments, the antibody or antibody fragment thereof comprises a sequence as set forth in any one of SEQ ID NOs: 7-1493. In some embodiments, the antibodies or antibody fragment is used for diagnosing or establishing cancer, inflammatory diseases or disorders, a metabolic disease or disorder, a cardiovascular disease or disorder, a respiratory disease or disorder, pain, a digestive disease or disorder, a reproductive disease or disorder, an endocrine disease or disorder, or a neurological disease or disorder in a subject. In some embodiments, the antibodies or antibody fragment is used for diagnosing or establishing solid cancer or a hematologic cancer. In some embodiments, the antibodies or antibody fragment is used for diagnosing or establishing gastric cancer, breast cancer, colorectal cancer, lung cancer, prostate cancer, hepatocellular carcinoma, leukemia, or lymphoma. In some embodiments, the antibodies or antibody fragment is used for diagnosing or establishing B-cell non-Hodgkin lymphoma. In some embodiments, the antibodies or antibody fragment is used for diagnosing or establishing a viral infection (e.g., caused by HIV).

[0144] In some instances, the subject is a mammal. In some instances, the subject is a mouse, rabbit, dog, or human. Subjects treated by methods described herein may be infants, adults, or children. Pharmaceutical compositions comprising antibodies or antibody fragments as described herein may be administered intravenously or subcutaneously.

[0145] Described herein are pharmaceutical compositions comprising antibodies or antibody fragment thereof that binds chemokine receptor. In some embodiments, the antibody or antibody fragment thereof comprises a sequence as set forth in any one of SEQ ID NOs: 7-1493. In some embodiments, the antibody or antibody fragment thereof comprises a sequence that is at least or about 70%, 80%, 85%, 90%, 91%, 92%, 93%, 94%, 95%, 96%, 97%, 98%, 99%, or 100% sequence identity to a sequence as set forth in any one of SEQ ID NOs: 7-1493.

[0146] Described herein are pharmaceutical compositions comprising antibodies or antibody fragment thereof that binds chemokine receptor that comprise various dosages of the antibodies or antibody fragment. In some instances, the dosage is ranging from about 1 to 80 mg/kg, from about 1 to about 100 mg/kg, from about 5 to about 100 mg/kg, from about 5 to about 80 mg/kg, from about 5 to about 60 mg/kg, from about 5 to about 50 mg/kg or from about 5 to about 500 mg/kg which can be administered in single or multiple doses. In some instances, the dosage is administered in an amount of about 0.01 mg/kg, about 0.05 mg/kg, about 0.10 mg/kg, about 0.25 mg/kg, about 0.5 mg/kg, about 1 mg/kg, about 5 mg/kg, about 10 mg/kg, about 15 mg/kg, about 20 mg/kg, about 25 mg/kg, about 30 mg/kg, about 35 mg/kg, about 40 mg/kg, about 45 mg/kg, about 50 mg/kg, about 55 mg/kg, about 60 mg/kg, about 65 mg/kg, about 70 mg/kg, about 75 mg/kg, about 80 mg/kg, about 85 mg/kg, about 90 mg/kg, about 95 mg/kg, about 100 mg/kg, about 105 mg/kg, about 110 mg/kg, about 115 mg/kg, about 120, about 125, about 130, about 135, about 140, about 145, about 150, about 155, about 160, about 165, about 170, about 175, about 180, about 185, about 190, about 195, about 200, about 205, about 210, about 215, about 220, about 225, about 230, about 240, about 250, about 260, about 270, about 275, about 280, about 290, about 300, about 310, about 320, about 330, about 340, about 350, about 360 mg/kg, about 370 mg/kg, about 380 mg/kg, about 390 mg/kg, about 400 mg/kg, 410 mg/kg, about 420 mg/kg, about 430 mg/kg, about 440 mg/kg, about 450 mg/kg, about 460 mg/kg, about 470 mg/kg, about 480 mg/kg, about 490 mg/kg, or about 500 mg/kg.

[0147] Variant Libraries

[0148] Codon Variation

[0149] Variant nucleic acid libraries described herein may comprise a plurality of nucleic acids, wherein each nucleic acid encodes for a variant codon sequence compared to a reference nucleic acid sequence. In some instances, each nucleic acid of a first nucleic acid population contains a variant at a single variant site. In some instances, the first nucleic acid population contains a plurality of variants at a single variant site such that the first nucleic acid population contains more than one variant at the same variant site. The first nucleic acid population may comprise nucleic acids collectively encoding multiple codon variants at the same variant site. The first nucleic acid population may comprise nucleic acids collectively encoding up to 19 or more codons at the same position. The first nucleic acid population may comprise nucleic acids collectively encoding up to 60 variant triplets at the same position, or the first nucleic acid population may comprise nucleic acids collectively encoding up to 61 different triplets of codons at the same position. Each variant may encode for a codon that results in a different amino acid during translation. Table 3 provides a listing of each codon possible (and the representative amino acid) for a variant site.

TABLE 2
List of codons and amino acids

| | One | Three | |
|---|---|---|---|
| | letter | letter | |
| Amino Acids | code | code | Codons |
| Alanine | A | Ala | GCA GCC GCG GCT |
| Cysteine | C | Cys | TGC TGT |
| Aspartic acid | D | Asp | GAC GAT |
| Glutamic acid | E | Glu | GAA GAG |
| Phenylalanine | F | Phe | TTC TTT |
| Glycine | G | Gly | GGA GGC GGG GGT |
| Histidine | H | His | CAC CAT |
| Isoleucine | I | Iso | ATA ATC ATT |
| Lysine | K | Lys | AAA AAG |
| Leucine | L | Leu | TTA TTG CTA CTC CTG |
| | | | CTT |
| Methionine | M | Met | ATG |
| Asparagine | N | Asn | AAC AAT |
| Proline | P | Pro | CCA CCC CCG CCT |
| Glutamine | Q | Gln | CAA CAG |
| Arginine | R | Arg | AGA AGG CGA CGC CGG |
| | | | CGT |
| Serine | S | Ser | AGC AGT TCA TCC TCG |
| | | | TCT |
| Threonine | T | Thr | ACA ACC ACG ACT |
| Valine | V | Val | GTA GTC GTG GTT |
| Tryptophan | W | Trp | TGG |
| Tyrosine | Y | Tyr | TAC TAT |

[0150] A nucleic acid population may comprise varied nucleic acids collectively encoding up to 20 codon variations at multiple positions. In such cases, each nucleic acid in the population comprises variation for codons at more than one position in the same nucleic acid. In some instances, each nucleic acid in the population comprises variation for codons at 1, 2, 3, 4, 5, 6, 7, 8, 9, 10, 11, 12, 13, 14, 15, 16, 17, 18, 19, 20 or more codons in a single nucleic acid. In some instances, each variant long nucleic acid comprises variation for codons at 1, 2, 3, 4, 5, 6, 7, 8, 9, 10, 11, 12, 13, 14, 15, 16, 17, 18, 19, 20, 21, 22, 23, 24, 25, 26, 27, 28, 29, 30 or more codons in a single long nucleic acid. In some instances, the variant nucleic acid population comprises variation for codons at 1, 2, 3, 4, 5, 6, 7, 8, 9, 10, 11, 12, 13, 14, 15, 16, 17, 18, 19, 20, 21, 22, 23, 24, 25, 26, 27, 28, 29, 30 or more codons in a single nucleic acid. In some instances, the variant nucleic acid population comprises variation for codons in at least about 10, 20, 30, 40, 50, 60, 70, 80, 90, 100 or more codons in a single long nucleic acid.

[0151] Highly Parallel Nucleic Acid Synthesis

[0152] Provided herein is a platform approach utilizing miniaturization, parallelization, and vertical integration of the end-to-end process from polynucleotide synthesis to gene assembly within nanowells on silicon to create a revolutionary synthesis platform. Devices described herein provide, with the same footprint as a 96-well plate, a silicon synthesis platform is capable of increasing throughput by a factor of up to 1,000 or more compared to traditional synthesis methods, with production of up to approximately 1,000,000 or more polynucleotides, or 10,000 or more genes in a single highly-parallelized run.

[0153] With the advent of next-generation sequencing, high resolution genomic data has become an important factor for studies that delve into the biological roles of various genes in both normal biology and disease pathogenesis. At the core of this research is the central dogma of molecular biology and the concept of “residue-by-residue transfer of sequential information.” Genomic information encoded in the DNA is transcribed into a message that is then translated into the protein that is the active product within a given biological pathway.

[0154] Another exciting area of study is on the discovery, development and manufacturing of therapeutic molecules focused on a highly-specific cellular target. High diversity DNA sequence libraries are at the core of development pipelines for targeted therapeutics. Gene mutants are used to express proteins in a design, build, and test protein engineering cycle that ideally culminates in an optimized gene for high expression of a protein with high affinity for its therapeutic target. As an example, consider the binding pocket of a receptor. The ability to test all sequence permutations of all residues within the binding pocket simultaneously will allow for a thorough exploration, increasing chances of success. Saturation mutagenesis, in which a researcher attempts to generate all possible mutations at a specific site within the receptor, represents one approach to this development challenge. Though costly and time and labor-intensive, it enables each variant to be introduced into each position. In contrast, combinatorial mutagenesis, where a few selected positions or short stretch of DNA may be modified extensively, generates an incomplete repertoire of variants with biased representation.

[0155] To accelerate the drug development pipeline, a library with the desired variants available at the intended frequency in the right position available for testing—in other words, a precision library, enables reduced costs as well as turnaround time for screening. Provided herein are methods for synthesizing nucleic acid synthetic variant libraries which provide for precise introduction of each intended variant at the desired frequency. To the end user, this translates to the ability to not only thoroughly sample sequence space but also be able to query these hypotheses in an efficient manner, reducing cost and screening time. Genome-wide editing can elucidate important pathways, libraries where each variant and sequence permutation can be tested for optimal functionality, and thousands of genes can be used to reconstruct entire pathways and genomes to re-engineer biological systems for drug discovery.

[0156] In a first example, a drug itself can be optimized using methods described herein. For example, to improve a specified function of an antibody, a variant polynucleotide library encoding for a portion of the antibody is designed and synthesized. A variant nucleic acid library for the antibody can then be generated by processes described herein (e.g., PCR mutagenesis followed by insertion into a vector). The antibody is then expressed in a production cell line and screened for enhanced activity. Example screens include examining modulation in binding affinity to an antigen, stability, or effector function (e.g., ADCC, complement, or apoptosis). Exemplary regions to optimize the antibody include, without limitation, the Fc region, Fab region, variable region of the Fab region, constant region of the Fab region, variable domain of the heavy chain or light chain (V_{H} or V_{L}), and specific complementarity-determining regions (CDRs) of V_{H} or V_{L}.

[0157] Nucleic acid libraries synthesized by methods described herein may be expressed in various cells associated with a disease state. Cells associated with a disease state include cell lines, tissue samples, primary cells from a subject, cultured cells expanded from a subject, or cells in a model system. Exemplary model systems include, without limitation, plant and animal models of a disease state.

[0158] To identify a variant molecule associated with prevention, reduction or treatment of a disease state, a variant nucleic acid library described herein is expressed in a cell associated with a disease state, or one in which a cell a disease state can be induced. In some instances, an agent is used to induce a disease state in cells. Exemplary tools for disease state induction include, without limitation, a Cre/Lox recombination system, LPS inflammation induction, and streptozotocin to induce hypoglycemia. The cells associated with a disease state may be cells from a model system or cultured cells, as well as cells from a subject having a particular disease condition. Exemplary disease conditions include a bacterial, fungal, viral, autoimmune, or proliferative disorder (e.g., cancer). In some instances, the variant nucleic acid library is expressed in the model system, cell line, or primary cells derived from a subject, and screened for changes in at least one cellular activity. Exemplary cellular activities include, without limitation, proliferation, cycle progression, cell death, adhesion, migration, reproduction, cell signaling, energy production, oxygen utilization, metabolic activity, and aging, response to free radical damage, or any combination thereof

[0159] Substrates

[0160] Devices used as a surface for polynucleotide synthesis may be in the form of substrates which include, without limitation, homogenous array surfaces, patterned array surfaces, channels, beads, gels, and the like. Provided herein are substrates comprising a plurality of clusters, wherein each cluster comprises a plurality of loci that support the attachment and synthesis of polynucleotides. In some instances, substrates comprise a homogenous array surface. For example, the homogenous array surface is a homogenous plate. The term “locus” as used herein refers to a discrete region on a structure which provides support for polynucleotides encoding for a single predetermined sequence to extend from the surface. In some instances, a locus is on a two dimensional surface, e.g., a substantially planar surface. In some instances, a locus is on a three-dimensional surface, e.g., a well, microwell, channel, or post. In some instances, a surface of a locus comprises a material that is actively functionalized to attach to at least one nucleotide for polynucleotide synthesis, or preferably, a population of identical nucleotides for synthesis of a population of polynucleotides. In some instances, polynucleotide refers to a population of polynucleotides encoding for the same nucleic acid sequence. In some cases, a surface of a substrate is inclusive of one or a plurality of surfaces of a substrate. The average error rates for polynucleotides synthesized within a library described here using the systems and methods provided are often less than 1 in 1000, less than about 1 in 2000, less than about 1 in 3000 or less often without error correction.

[0161] Provided herein are surfaces that support the parallel synthesis of a plurality of polynucleotides having different predetermined sequences at addressable locations on a common support. In some instances, a substrate provides support for the synthesis of more than 50, 100, 200, 400, 600, 800, 1000, 1200, 1400, 1600, 1800, 2,000; 5,000; 10,000; 20,000; 50,000; 100,000; 200,000; 300,000; 400,000; 500,000; 600,000; 700,000; 800,000; 900,000; 1,000,000; 1,200,000; 1,400,000; 1,600,000; 1,800,000; 2,000,000; 2,500,000; 3,000,000; 3,500,000; 4,000,000; 4,500,000; 5,000,000; 10,000,000 or more non-identical polynucleotides. In some cases, the surfaces provide support for the synthesis of more than 50, 100, 200, 400, 600, 800, 1000, 1200, 1400, 1600, 1800, 2,000; 5,000; 10,000; 20,000; 50,000; 100,000; 200,000; 300,000; 400,000; 500,000; 600,000; 700,000; 800,000; 900,000; 1,000,000; 1,200,000; 1,400,000; 1,600,000; 1,800,000; 2,000,000; 2,500,000; 3,000,000; 3,500,000; 4,000,000; 4,500,000; 5,000,000; 10,000,000 or more polynucleotides encoding for distinct sequences. In some instances, at least a portion of the polynucleotides have an identical sequence or are configured to be synthesized with an identical sequence. In some instances, the substrate provides a surface environment for the growth of polynucleotides having at least 80, 90, 100, 120, 150, 175, 200, 225, 250, 275, 300, 325, 350, 375, 400, 425, 450, 475, 500 bases or more.

[0162] Provided herein are methods for polynucleotide synthesis on distinct loci of a substrate, wherein each locus supports the synthesis of a population of polynucleotides. In some cases, each locus supports the synthesis of a population of polynucleotides having a different sequence than a population of polynucleotides grown on another locus. In some instances, each polynucleotide sequence is synthesized with 1, 2, 3, 4, 5, 6, 7, 8, 9 or more redundancy across different loci within the same cluster of loci on a surface for polynucleotide synthesis. In some instances, the loci of a substrate are located within a plurality of clusters. In some instances, a substrate comprises at least 10, 500, 1000, 2000, 3000, 4000, 5000, 6000, 7000, 8000, 9000, 10000, 11000, 12000, 13000, 14000, 15000, 20000, 30000, 40000, 50000 or more clusters. In some instances, a substrate comprises more than 2,000; 5,000; 10,000; 100,000; 200,000; 300,000; 400,000; 500,000; 600,000; 700,000; 800,000; 900,000; 1,000,000; 1,100,000; 1,200,000; 1,300,000; 1,400,000; 1,500,000; 1,600,000; 1,700,000; 1,800,000; 1,900,000; 2,000,000; 300,000; 400,000; 500,000; 600,000; 700,000; 800,000; 900,000; 1,000,000; 1,200,000; 1,400,000; 1,600,000; 1,800,000; 2,000,000; 2,500,000; 3,000,000; 3,500,000; 4,000,000; 4,500,000; 5,000,000; or 10,000,000 or more distinct loci. In some instances, a substrate comprises about 10,000 distinct loci. The amount of loci within a single cluster is varied in different instances. In some cases, each cluster includes 1, 2, 3, 4, 5, 6, 7, 8, 9, 10, 20, 30, 40, 50, 60, 70, 80, 90, 100, 120, 130, 150, 200, 300, 400, 500 or more loci. In some instances, each cluster includes about 50-500 loci. In some instances, each cluster includes about 100-200 loci. In some instances, each cluster includes about 100-150 loci. In some instances, each cluster includes about 109, 121, 130 or 137 loci. In some instances, each cluster includes about 19, 20, 61, 64 or more loci. Alternatively or in combination, polynucleotide synthesis occurs on a homogenous array surface.

[0163] In some instances, the number of distinct polynucleotides synthesized on a substrate is dependent on the number of distinct loci available in the substrate. In some instances, the density of loci within a cluster or surface of a substrate is at least or about 1, 10, 25, 50, 65, 75, 100, 130, 150, 175, 200, 300, 400, 500, 1,000 or more loci per mm². In some cases, a substrate comprises 10-500, 25-400, 50-500, 100-500, 150-500, 10-250, 50-250, 10-200, or 50-200 mm². In some instances, the distance between the centers of two adjacent loci within a cluster or surface is from about 10-500, from about 10-200, or from about 10-100 um. In some instances, the distance between two centers of adjacent loci is greater than about 10, 20, 30, 40, 50, 60, 70, 80, 90 or 100 um. In some instances, the distance between the centers of two adjacent loci is less than about 200, 150, 100, 80, 70, 60, 50, 40, 30, 20 or 10 um. In some instances, each locus has a width of about 0.5, 1, 2, 3, 4, 5, 6, 7, 8, 9, 10, 20, 30, 40, 50, 60, 70, 80, 90 or 100 um. In some cases, each locus has a width of about 0.5-100, 0.5-50, 10-75, or 0.5-50 um.

[0164] In some instances, the density of clusters within a substrate is at least or about 1 cluster per 100 mm², 1 cluster per 10 mm², 1 cluster per 5 mm², 1 cluster per 4 mm², 1 cluster per 3 mm², 1 cluster per 2 mm², 1 cluster per 1 mm², 2 clusters per 1 mm², 3 clusters per 1 mm², 4 clusters per 1 mm², 5 clusters per 1 mm², 10 clusters per 1 mm², 50 clusters per 1 mm² or more. In some instances, a substrate comprises from about 1 cluster per 10 mm² to about 10 clusters per 1 mm². In some instances, the distance between the centers of two adjacent clusters is at least or about 50, 100, 200, 500, 1000, 2000, or 5000 um. In some cases, the distance between the centers of two adjacent clusters is between about 50-100, 50-200, 50-300, 50-500, and 100-2000 um. In some cases, the distance between the centers of two adjacent clusters is between about 0.05-50, 0.05-10, 0.05-5, 0.05-4, 0.05-3, 0.05-2, 0.1-10, 0.2-10, 0.3-10, 0.4-10, 0.5-10, 0.5-5, or 0.5-2 mm. In some cases, each cluster has a cross section of about 0.5 to about 2, about 0.5 to about 1, or about 1 to about 2 mm. In some cases, each cluster has a cross section of about 0.5, 0.6, 0.7, 0.8, 0.9, 1, 1.1, 1.2, 1.3, 1.4, 1.5, 1.6, 1.7, 1.8, 1.9 or 2 mm. In some cases, each cluster has an interior cross section of about 0.5, 0.6, 0.7, 0.8, 0.9, 1, 1.1, 1.15, 1.2, 1.3, 1.4, 1.5, 1.6, 1.7, 1.8, 1.9 or 2 mm.

[0165] In some instances, a substrate is about the size of a standard 96 well plate, for example between about 100 and about 200 mm by between about 50 and about 150 mm. In some instances, a substrate has a diameter less than or equal to about 1000, 500, 450, 400, 300, 250, 200, 150, 100 or 50 mm. In some instances, the diameter of a substrate is between about 25-1000, 25-800, 25-600, 25-500, 25-400, 25-300, or 25-200 mm. In some instances, a substrate has a planar surface area of at least about 100; 200; 500; 1,000; 2,000; 5,000; 10,000; 12,000; 15,000; 20,000; 30,000; 40,000; 50,000 mm² or more. In some instances, the thickness of a substrate is between about 50-2000, 50-1000, 100-1000, 200-1000, or 250-1000 mm.

[0166] Surface Materials

[0167] Substrates, devices, and reactors provided herein are fabricated from any variety of materials suitable for the methods, compositions, and systems described herein. In certain instances, substrate materials are fabricated to exhibit a low level of nucleotide binding. In some instances, substrate materials are modified to generate distinct surfaces that exhibit a high level of nucleotide binding. In some instances, substrate materials are transparent to visible and/or UV light. In some instances, substrate materials are sufficiently conductive, e.g., are able to form uniform electric fields across all or a portion of a substrate. In some instances, conductive materials are connected to an electric ground. In some instances, the substrate is heat conductive or insulated. In some instances, the materials are chemical resistant and heat resistant to support chemical or biochemical reactions, for example polynucleotide synthesis reaction processes. In some instances, a substrate comprises flexible materials. For flexible materials, materials can include, without limitation: nylon, both modified and unmodified, nitrocellulose, polypropylene, and the like. In some instances, a substrate comprises rigid materials. For rigid materials, materials can include, without limitation: glass; fuse silica; silicon, plastics (for example polytetraflouroethylene, polypropylene, polystyrene, polycarbonate, and blends thereof, and the like); metals (for example, gold, platinum, and the like). The substrate, solid support or reactors can be fabricated from a material selected from the group consisting of silicon, polystyrene, agarose, dextran, cellulosic polymers, polyacrylamides, polydimethylsiloxane (PDMS), and glass. The substrates/solid supports or the microstructures, reactors therein may be manufactured with a combination of materials listed herein or any other suitable material known in the art.

[0168] Surface Architecture

[0169] Provided herein are substrates for the methods, compositions, and systems described herein, wherein the substrates have a surface architecture suitable for the methods, compositions, and systems described herein. In some instances, a substrate comprises raised and/or lowered features. One benefit of having such features is an increase in surface area to support polynucleotide synthesis. In some instances, a substrate having raised and/or lowered features is referred to as a three-dimensional substrate. In some cases, a three-dimensional substrate comprises one or more channels. In some cases, one or more loci comprise a channel. In some cases, the channels are accessible to reagent deposition via a deposition device such as a material deposition device. In some cases, reagents and/or fluids collect in a larger well in fluid communication one or more channels. For example, a substrate comprises a plurality of channels corresponding to a plurality of loci with a cluster, and the plurality of channels are in fluid communication with one well of the cluster. In some methods, a library of polynucleotides is synthesized in a plurality of loci of a cluster.

[0170] Provided herein are substrates for the methods, compositions, and systems described herein, wherein the substrates are configured for polynucleotide synthesis. In some instances, the structure is configured to allow for controlled flow and mass transfer paths for polynucleotide synthesis on a surface. In some instances, the configuration of a substrate allows for the controlled and even distribution of mass transfer paths, chemical exposure times, and/or wash efficacy during polynucleotide synthesis. In some instances, the configuration of a substrate allows for increased sweep efficiency, for example by providing sufficient volume for a growing polynucleotide such that the excluded volume by the growing polynucleotide does not take up more than 50, 45, 40, 35, 30, 25, 20, 15, 14, 13, 12, 11, 10, 9, 8, 7, 6, 5, 4, 3, 2, 1%, or less of the initially available volume that is available or suitable for growing the polynucleotide. In some instances, a three-dimensional structure allows for managed flow of fluid to allow for the rapid exchange of chemical exposure.

[0171] Provided herein are substrates for the methods, compositions, and systems described herein, wherein the substrates comprise structures suitable for the methods, compositions, and systems described herein. In some instances, segregation is achieved by physical structure. In some instances, segregation is achieved by differential functionalization of the surface generating active and passive regions for polynucleotide synthesis. In some instances, differential functionalization is achieved by alternating the hydrophobicity across the substrate surface, thereby creating water contact angle effects that cause beading or wetting of the deposited reagents. Employing larger structures can decrease splashing and cross-contamination of distinct polynucleotide synthesis locations with reagents of the neighboring spots. In some cases, a device, such as a material deposition device, is used to deposit reagents to distinct polynucleotide synthesis locations. Substrates having three-dimensional features are configured in a manner that allows for the synthesis of a large number of polynucleotides (e.g., more than about 10,000) with a low error rate (e.g., less than about 1:500, 1:1000, 1:1500, 1:2,000, 1:3,000, 1:5,000, or 1:10,000). In some cases, a substrate comprises features with a density of about or greater than about 1, 5, 10, 20, 30, 40, 50, 60, 70, 80, 100, 110, 120, 130, 140, 150, 160, 170, 180, 190, 200, 300, 400 or 500 features per mm².

[0172] A well of a substrate may have the same or different width, height, and/or volume as another well of the substrate. A channel of a substrate may have the same or different width, height, and/or volume as another channel of the substrate. In some instances, the diameter of a cluster or the diameter of a well comprising a cluster, or both, is between about 0.05-50, 0.05-10, 0.05-5, 0.05-4, 0.05-3, 0.05-2, 0.05-1, 0.05-0.5, 0.05-0.1, 0.1-10, 0.2-10, 0.3-10, 0.4-10, 0.5-10, 0.5-5, or 0.5-2 mm. In some instances, the diameter of a cluster or well or both is less than or about 5, 4, 3, 2, 1, 0.5, 0.1, 0.09, 0.08, 0.07, 0.06, or 0.05 mm. In some instances, the diameter of a cluster or well or both is between about 1.0 and 1.3 mm. In some instances, the diameter of a cluster or well, or both is about 1.150 mm. In some instances, the diameter of a cluster or well, or both is about 0.08 mm. The diameter of a cluster refers to clusters within a two-dimensional or three-dimensional substrate.

[0173] In some instances, the height of a well is from about 20-1000, 50-1000, 100-1000, 200-1000, 300-1000, 400-1000, or 500-1000 um. In some cases, the height of a well is less than about 1000, 900, 800, 700, or 600 um.

[0174] In some instances, a substrate comprises a plurality of channels corresponding to a plurality of loci within a cluster, wherein the height or depth of a channel is 5-500, 5-400, 5-300, 5-200, 5-100, 5-50, or 10-50 um. In some cases, the height of a channel is less than 100, 80, 60, 40, or 20 um.

[0175] In some instances, the diameter of a channel, locus (e.g., in a substantially planar substrate) or both channel and locus (e.g., in a three-dimensional substrate wherein a locus corresponds to a channel) is from about 1-1000, 1-500, 1-200, 1-100, 5-100, or 10-100 um, for example, about 90, 80, 70, 60, 50, 40, 30, 20 or 10 um. In some instances, the diameter of a channel, locus, or both channel and locus is less than about 100, 90, 80, 70, 60, 50, 40, 30, 20 or 10 um. In some instances, the distance between the center of two adjacent channels, loci, or channels and loci is from about 1-500, 1-200, 1-100, 5-200, 5-100, 5-50, or 5-30, for example, about 20 um.

[0176] Surface Modifications

[0177] Provided herein are methods for polynucleotide synthesis on a surface, wherein the surface comprises various surface modifications. In some instances, the surface modifications are employed for the chemical and/or physical alteration of a surface by an additive or subtractive process to change one or more chemical and/or physical properties of a substrate surface or a selected site or region of a substrate surface. For example, surface modifications include, without limitation, (1) changing the wetting properties of a surface, (2) functionalizing a surface, i.e., providing, modifying or substituting surface functional groups, (3) defunctionalizing a surface, i.e., removing surface functional groups, (4) otherwise altering the chemical composition of a surface, e.g., through etching, (5) increasing or decreasing surface roughness, (6) providing a coating on a surface, e.g., a coating that exhibits wetting properties that are different from the wetting properties of the surface, and/or (7) depositing particulates on a surface.

[0178] In some cases, the addition of a chemical layer on top of a surface (referred to as adhesion promoter) facilitates structured patterning of loci on a surface of a substrate. Exemplary surfaces for application of adhesion promotion include, without limitation, glass, silicon, silicon dioxide and silicon nitride. In some cases, the adhesion promoter is a chemical with a high surface energy. In some instances, a second chemical layer is deposited on a surface of a substrate. In some cases, the second chemical layer has a low surface energy. In some cases, surface energy of a chemical layer coated on a surface supports localization of droplets on the surface. Depending on the patterning arrangement selected, the proximity of loci and/or area of fluid contact at the loci are alterable.

[0179] In some instances, a substrate surface, or resolved loci, onto which nucleic acids or other moieties are deposited, e.g., for polynucleotide synthesis, are smooth or substantially planar (e.g., two-dimensional) or have irregularities, such as raised or lowered features (e.g., three-dimensional features). In some instances, a substrate surface is modified with one or more different layers of compounds. Such modification layers of interest include, without limitation, inorganic and organic layers such as metals, metal oxides, polymers, small organic molecules and the like.

[0180] In some instances, resolved loci of a substrate are functionalized with one or more moieties that increase and/or decrease surface energy. In some cases, a moiety is chemically inert. In some cases, a moiety is configured to support a desired chemical reaction, for example, one or more processes in a polynucleotide synthesis reaction. The surface energy, or hydrophobicity, of a surface is a factor for determining the affinity of a nucleotide to attach onto the surface. In some instances, a method for substrate functionalization comprises: (a) providing a substrate having a surface that comprises silicon dioxide; and (b) silanizing the surface using, a suitable silanizing agent described herein or otherwise known in the art, for example, an organofunctional alkoxysilane molecule. Methods and functionalizing agents are described in U.S. Pat. No. 5,474,796, which is herein incorporated by reference in its entirety.

[0181] In some instances, a substrate surface is functionalized by contact with a derivatizing composition that contains a mixture of silanes, under reaction conditions effective to couple the silanes to the substrate surface, typically via reactive hydrophilic moieties present on the substrate surface. Silanization generally covers a surface through self-assembly with organofunctional alkoxysilane molecules. A variety of siloxane functionalizing reagents can further be used as currently known in the art, e.g., for lowering or increasing surface energy. The organofunctional alkoxysilanes are classified according to their organic functions.

[0182] Polynucleotide Synthesis

[0183] Methods of the current disclosure for polynucleotide synthesis may include processes involving phosphoramidite chemistry. In some instances, polynucleotide synthesis comprises coupling a base with phosphoramidite. Polynucleotide synthesis may comprise coupling a base by deposition of phosphoramidite under coupling conditions, wherein the same base is optionally deposited with phosphoramidite more than once, i.e., double coupling. Polynucleotide synthesis may comprise capping of unreacted sites. In some instances, capping is optional. Polynucleotide synthesis may also comprise oxidation or an oxidation step or oxidation steps. Polynucleotide synthesis may comprise deblocking, detritylation, and sulfurization. In some instances, polynucleotide synthesis comprises either oxidation or sulfurization. In some instances, between one or each step during a polynucleotide synthesis reaction, the device is washed, for example, using tetrazole or acetonitrile. Time frames for any one step in a phosphoramidite synthesis method may be less than about 2 min, 1 min, 50 sec, 40 sec, 30 sec, 20 sec and 10 sec.

[0184] Polynucleotide synthesis using a phosphoramidite method may comprise a subsequent addition of a phosphoramidite building block (e.g., nucleoside phosphoramidite) to a growing polynucleotide chain for the formation of a phosphite triester linkage. Phosphoramidite polynucleotide synthesis proceeds in the 3′ to 5′ direction. Phosphoramidite polynucleotide synthesis allows for the controlled addition of one nucleotide to a growing nucleic acid chain per synthesis cycle. In some instances, each synthesis cycle comprises a coupling step. Phosphoramidite coupling involves the formation of a phosphite triester linkage between an activated nucleoside phosphoramidite and a nucleoside bound to the substrate, for example, via a linker. In some instances, the nucleoside phosphoramidite is provided to the device activated. In some instances, the nucleoside phosphoramidite is provided to the device with an activator. In some instances, nucleoside phosphoramidites are provided to the device in a 1.5, 2, 3, 4, 5, 6, 7, 8, 9, 10, 11, 12, 13, 14, 15, 16, 17, 18, 19, 20, 25, 30, 35, 40, 50, 60, 70, 80, 90, 100-fold excess or more over the substrate-bound nucleosides. In some instances, the addition of nucleoside phosphoramidite is performed in an anhydrous environment, for example, in anhydrous acetonitrile. Following addition of a nucleoside phosphoramidite, the device is optionally washed. In some instances, the coupling step is repeated one or more additional times, optionally with a wash step between nucleoside phosphoramidite additions to the substrate. In some instances, a polynucleotide synthesis method used herein comprises 1, 2, 3 or more sequential coupling steps. Prior to coupling, in many cases, the nucleoside bound to the device is de-protected by removal of a protecting group, where the protecting group functions to prevent polymerization. A common protecting group is 4,4′-dimethoxytrityl (DMT).

[0185] Following coupling, phosphoramidite polynucleotide synthesis methods optionally comprise a capping step. In a capping step, the growing polynucleotide is treated with a capping agent. A capping step is useful to block unreacted substrate-bound 5′-OH groups after coupling from further chain elongation, preventing the formation of polynucleotides with internal base deletions. Further, phosphoramidites activated with 1H-tetrazole may react, to a small extent, with the O6 position of guanosine. Without being bound by theory, upon oxidation with I₂/water, this side product, possibly via O6-N7 migration, may undergo depurination. The apurinic sites may end up being cleaved in the course of the final deprotection of the polynucleotide thus reducing the yield of the full-length product. The O6 modifications may be removed by treatment with the capping reagent prior to oxidation with I₂/water. In some instances, inclusion of a capping step during polynucleotide synthesis decreases the error rate as compared to synthesis without capping. As an example, the capping step comprises treating the substrate-bound polynucleotide with a mixture of acetic anhydride and 1-methylimidazole. Following a capping step, the device is optionally washed.

[0186] In some instances, following addition of a nucleoside phosphoramidite, and optionally after capping and one or more wash steps, the device bound growing nucleic acid is oxidized. The oxidation step comprises the phosphite triester is oxidized into a tetracoordinated phosphate triester, a protected precursor of the naturally occurring phosphate diester internucleoside linkage. In some instances, oxidation of the growing polynucleotide is achieved by treatment with iodine and water, optionally in the presence of a weak base (e.g., pyridine, lutidine, collidine). Oxidation may be carried out under anhydrous conditions using, e.g. tert-Butyl hydroperoxide or (1S)-(+)-(10-camphorsulfonyl)-oxaziridine (CSO). In some methods, a capping step is performed following oxidation. A second capping step allows for device drying, as residual water from oxidation that may persist can inhibit subsequent coupling. Following oxidation, the device and growing polynucleotide is optionally washed. In some instances, the step of oxidation is substituted with a sulfurization step to obtain polynucleotide phosphorothioates, wherein any capping steps can be performed after the sulfurization. Many reagents are capable of the efficient sulfur transfer, including but not limited to 3-(Dimethylaminomethylidene)amino)-3H-1,2,4-dithiazole-3-thione, DDTT, 3H-1,2-benzodithiol-3-one 1,1-dioxide, also known as Beaucage reagent, and N,N,N′N′-Tetraethylthiuram disulfide (TETD).

[0187] In order for a subsequent cycle of nucleoside incorporation to occur through coupling, the protected 5′ end of the device bound growing polynucleotide is removed so that the primary hydroxyl group is reactive with a next nucleoside phosphoramidite. In some instances, the protecting group is DMT and deblocking occurs with trichloroacetic acid in dichloromethane. Conducting detritylation for an extended time or with stronger than recommended solutions of acids may lead to increased depurination of solid support-bound polynucleotide and thus reduces the yield of the desired full-length product. Methods and compositions of the disclosure described herein provide for controlled deblocking conditions limiting undesired depurination reactions. In some instances, the device bound polynucleotide is washed after deblocking. In some instances, efficient washing after deblocking contributes to synthesized polynucleotides having a low error rate.

[0188] Methods for the synthesis of polynucleotides typically involve an iterating sequence of the following steps: application of a protected monomer to an actively functionalized surface (e.g., locus) to link with either the activated surface, a linker or with a previously deprotected monomer; deprotection of the applied monomer so that it is reactive with a subsequently applied protected monomer; and application of another protected monomer for linking. One or more intermediate steps include oxidation or sulfurization. In some instances, one or more wash steps precede or follow one or all of the steps.

[0189] Methods for phosphoramidite-based polynucleotide synthesis comprise a series of chemical steps. In some instances, one or more steps of a synthesis method involve reagent cycling, where one or more steps of the method comprise application to the device of a reagent useful for the step. For example, reagents are cycled by a series of liquid deposition and vacuum drying steps. For substrates comprising three-dimensional features such as wells, microwells, channels and the like, reagents are optionally passed through one or more regions of the device via the wells and/or channels.

[0190] Methods and systems described herein relate to polynucleotide synthesis devices for the synthesis of polynucleotides. The synthesis may be in parallel. For example, at least or about at least 2, 3, 4, 5, 6, 7, 8, 9, 10, 11, 12, 13, 14, 15, 16, 17, 18, 19, 20, 21, 22, 23, 24, 25, 30, 35, 40, 45, 50, 100, 150, 200, 250, 300, 350, 400, 450, 500, 550, 600, 650, 700, 750, 800, 850, 900, 1000, 10000, 50000, 75000, 100000 or more polynucleotides can be synthesized in parallel. The total number polynucleotides that may be synthesized in parallel may be from 2-100000, 3-50000, 4-10000, 5-1000, 6-900, 7-850, 8-800, 9-750, 10-700, 11-650, 12-600, 13-550, 14-500, 15-450, 16-400, 17-350, 18-300, 19-250, 20-200, 21-150,22-100, 23-50, 24-45, 25-40, 30-35. Those of skill in the art appreciate that the total number of polynucleotides synthesized in parallel may fall within any range bound by any of these values, for example 25-100. The total number of polynucleotides synthesized in parallel may fall within any range defined by any of the values serving as endpoints of the range. Total molar mass of polynucleotides synthesized within the device or the molar mass of each of the polynucleotides may be at least or at least about 10, 20, 30, 40, 50, 100, 250, 500, 750, 1000, 2000, 3000, 4000, 5000, 6000, 7000, 8000, 9000, 10000, 25000, 50000, 75000, 100000 picomoles, or more. The length of each of the polynucleotides or average length of the polynucleotides within the device may be at least or about at least 10, 15, 20, 25, 30, 35, 40, 45, 50, 100, 150, 200, 300, 400, 500 nucleotides, or more. The length of each of the polynucleotides or average length of the polynucleotides within the device may be at most or about at most 500, 400, 300, 200, 150, 100, 50, 45, 35, 30, 25, 20, 19, 18, 17, 16, 15, 14, 13, 12, 11, 10 nucleotides, or less. The length of each of the polynucleotides or average length of the polynucleotides within the device may fall from 10-500, 9-400, 11-300, 12-200, 13-150, 14-100, 15-50, 16-45, 17-40, 18-35, 19-25. Those of skill in the art appreciate that the length of each of the polynucleotides or average length of the polynucleotides within the device may fall within any range bound by any of these values, for example 100-300. The length of each of the polynucleotides or average length of the polynucleotides within the device may fall within any range defined by any of the values serving as endpoints of the range.

[0191] Methods for polynucleotide synthesis on a surface provided herein allow for synthesis at a fast rate. As an example, at least 3, 4, 5, 6, 7, 8, 9, 10, 11, 12, 13, 14, 15, 16, 17, 18, 19, 20, 21, 22, 23, 24, 25, 26, 27, 28, 29, 30, 35, 40, 45, 50, 55, 60, 70, 80, 90, 100, 125, 150, 175, 200 nucleotides per hour, or more are synthesized. Nucleotides include adenine, guanine, thymine, cytosine, uridine building blocks, or analogs/modified versions thereof. In some instances, libraries of polynucleotides are synthesized in parallel on substrate. For example, a device comprising about or at least about 100; 1,000; 10,000; 30,000; 75,000; 100,000; 1,000,000; 2,000,000; 3,000,000; 4,000,000; or 5,000,000 resolved loci is able to support the synthesis of at least the same number of distinct polynucleotides, wherein polynucleotide encoding a distinct sequence is synthesized on a resolved locus. In some instances, a library of polynucleotides is synthesized on a device with low error rates described herein in less than about three months, two months, one month, three weeks, 15, 14, 13, 12, 11, 10, 9, 8, 7, 6, 5, 4, 3, 2 days, 24 hours or less. In some instances, larger nucleic acids assembled from a polynucleotide library synthesized with low error rate using the substrates and methods described herein are prepared in less than about three months, two months, one month, three weeks, 15, 14, 13, 12, 11, 10, 9, 8, 7, 6, 5, 4, 3, 2 days, 24 hours or less.

[0192] In some instances, methods described herein provide for generation of a library of nucleic acids comprising variant nucleic acids differing at a plurality of codon sites. In some instances, a nucleic acid may have 1 site, 2 sites, 3 sites, 4 sites, 5 sites, 6 sites, 7 sites, 8 sites, 9 sites, 10 sites, 11 sites, 12 sites, 13 sites, 14 sites, 15 sites, 16 sites, 17 sites 18 sites, 19 sites, 20 sites, 30 sites, 40 sites, 50 sites, or more of variant codon sites.

[0193] In some instances, the one or more sites of variant codon sites may be adjacent. In some instances, the one or more sites of variant codon sites may not be adjacent and separated by 1, 2, 3, 4, 5, 6, 7, 8, 9, 10, or more codons.

[0194] In some instances, a nucleic acid may comprise multiple sites of variant codon sites, wherein all the variant codon sites are adjacent to one another, forming a stretch of variant codon sites. In some instances, a nucleic acid may comprise multiple sites of variant codon sites, wherein none the variant codon sites are adjacent to one another. In some instances, a nucleic acid may comprise multiple sites of variant codon sites, wherein some the variant codon sites are adjacent to one another, forming a stretch of variant codon sites, and some of the variant codon sites are not adjacent to one another.

[0195] Referring to the Figures, FIG. 3 illustrates an exemplary process workflow for synthesis of nucleic acids (e.g., genes) from shorter nucleic acids. The workflow is divided generally into phases: (1) de novo synthesis of a single stranded nucleic acid library, (2) joining nucleic acids to form larger fragments, (3) error correction, (4) quality control, and (5) shipment. Prior to de novo synthesis, an intended nucleic acid sequence or group of nucleic acid sequences is preselected. For example, a group of genes is preselected for generation.

[0196] Once large nucleic acids for generation are selected, a predetermined library of nucleic acids is designed for de novo synthesis. Various suitable methods are known for generating high density polynucleotide arrays. In the workflow example, a device surface layer is provided. In the example, chemistry of the surface is altered in order to improve the polynucleotide synthesis process. Areas of low surface energy are generated to repel liquid while areas of high surface energy are generated to attract liquids. The surface itself may be in the form of a planar surface or contain variations in shape, such as protrusions or microwells which increase surface area. In the workflow example, high surface energy molecules selected serve a dual function of supporting DNA chemistry, as disclosed in International Patent Application Publication WO/2015/021080, which is herein incorporated by reference in its entirety.

[0197] In situ preparation of polynucleotide arrays is generated on a solid support and utilizes single nucleotide extension process to extend multiple oligomers in parallel. A deposition device, such as a material deposition device, is designed to release reagents in a step wise fashion such that multiple polynucleotides extend, in parallel, one residue at a time to generate oligomers with a predetermined nucleic acid sequence 302. In some instances, polynucleotides are cleaved from the surface at this stage. Cleavage includes gas cleavage, e.g., with ammonia or methylamine.

[0198] The generated polynucleotide libraries are placed in a reaction chamber. In this exemplary workflow, the reaction chamber (also referred to as “nanoreactor”) is a silicon coated well, containing PCR reagents and lowered onto the polynucleotide library 303. Prior to or after the sealing 304 of the polynucleotides, a reagent is added to release the polynucleotides from the substrate. In the exemplary workflow, the polynucleotides are released subsequent to sealing of the nanoreactor 305. Once released, fragments of single stranded polynucleotides hybridize in order to span an entire long range sequence of DNA. Partial hybridization 305 is possible because each synthesized polynucleotide is designed to have a small portion overlapping with at least one other polynucleotide in the pool.

[0199] After hybridization, a PCA reaction is commenced. During the polymerase cycles, the polynucleotides anneal to complementary fragments and gaps are filled in by a polymerase. Each cycle increases the length of various fragments randomly depending on which polynucleotides find each other. Complementarity amongst the fragments allows for forming a complete large span of double stranded DNA 306.

[0200] After PCA is complete, the nanoreactor is separated from the device 307 and positioned for interaction with a device having primers for PCR 308. After sealing, the nanoreactor is subject to PCR 309 and the larger nucleic acids are amplified. After PCR 310, the nanochamber is opened 311, error correction reagents are added 312, the chamber is sealed 313 and an error correction reaction occurs to remove mismatched base pairs and/or strands with poor complementarity from the double stranded PCR amplification products 314. The nanoreactor is opened and separated 315. Error corrected product is next subject to additional processing steps, such as PCR and molecular bar coding, and then packaged 322 for shipment 323.

[0201] In some instances, quality control measures are taken. After error correction, quality control steps include for example interaction with a wafer having sequencing primers for amplification of the error corrected product 316, sealing the wafer to a chamber containing error corrected amplification product 317, and performing an additional round of amplification 318. The nanoreactor is opened 319 and the products are pooled 320 and sequenced 321. After an acceptable quality control determination is made, the packaged product 322 is approved for shipment 323.

[0202] In some instances, a nucleic acid generated by a workflow such as that in FIG. 3 is subject to mutagenesis using overlapping primers disclosed herein. In some instances, a library of primers are generated by in situ preparation on a solid support and utilize single nucleotide extension process to extend multiple oligomers in parallel. A deposition device, such as a material deposition device, is designed to release reagents in a step wise fashion such that multiple polynucleotides extend, in parallel, one residue at a time to generate oligomers with a predetermined nucleic acid sequence 302.

[0203] Computer Systems

[0204] Any of the systems described herein, may be operably linked to a computer and may be automated through a computer either locally or remotely. In various instances, the methods and systems of the disclosure may further comprise software programs on computer systems and use thereof. Accordingly, computerized control for the synchronization of the dispense/vacuum/refill functions such as orchestrating and synchronizing the material deposition device movement, dispense action and vacuum actuation are within the bounds of the disclosure. The computer systems may be programmed to interface between the user specified base sequence and the position of a material deposition device to deliver the correct reagents to specified regions of the substrate.

[0205] The computer system 400 illustrated in FIG. 4 may be understood as a logical apparatus that can read instructions from media 411 and/or a network port 405, which can optionally be connected to server 409 having fixed media 412. The system, such as shown in FIG. 4 can include a CPU 401, disk drives 403, optional input devices such as keyboard 415 and/or mouse 416 and optional monitor 407. Data communication can be achieved through the indicated communication medium to a server at a local or a remote location. The communication medium can include any means of transmitting and/or receiving data. For example, the communication medium can be a network connection, a wireless connection or an internet connection. Such a connection can provide for communication over the World Wide Web. It is envisioned that data relating to the present disclosure can be transmitted over such networks or connections for reception and/or review by a party 422 as illustrated in FIG. 4.

[0206] FIG. 5 is a block diagram illustrating a first example architecture of a computer system 500 that can be used in connection with example instances of the present disclosure. As depicted in FIG. 5, the example computer system can include a processor 502 for processing instructions. Non-limiting examples of processors include: Intel Xeon™ processor, AMD Opteron™ processor, Samsung 32-bit RISC ARM 1176JZ(F)-S v1.0™ processor, ARM Cortex-A8 Samsung S5PC100™ processor, ARM Cortex-A8 Apple A4™ processor, Marvell PXA 930™ processor, or a functionally-equivalent processor. Multiple threads of execution can be used for parallel processing. In some instances, multiple processors or processors with multiple cores can also be used, whether in a single computer system, in a cluster, or distributed across systems over a network comprising a plurality of computers, cell phones, and/or personal data assistant devices.

[0207] As illustrated in FIG. 5, a high speed cache 504 can be connected to, or incorporated in, the processor 502 to provide a high speed memory for instructions or data that have been recently, or are frequently, used by the processor 502. The processor 502 is connected to a north bridge 506 by a processor bus 508. The north bridge 506 is connected to random access memory (RAM) 510 by a memory bus 512 and manages access to the RAM 510 by the processor 502. The north bridge 506 is also connected to a south bridge 514 by a chipset bus 516. The south bridge 514 is, in turn, connected to a peripheral bus 518. The peripheral bus can be, for example, PCI, PCI-X, PCI Express, or other peripheral bus. The north bridge and south bridge are often referred to as a processor chipset and manage data transfer between the processor, RAM, and peripheral components on the peripheral bus 518. In some alternative architectures, the functionality of the north bridge can be incorporated into the processor instead of using a separate north bridge chip. In some instances, system 500 can include an accelerator card 522 attached to the peripheral bus 518. The accelerator can include field programmable gate arrays (FPGAs) or other hardware for accelerating certain processing. For example, an accelerator can be used for adaptive data restructuring or to evaluate algebraic expressions used in extended set processing.

[0208] Software and data are stored in external storage 524 and can be loaded into RAM 510 and/or cache 504 for use by the processor. The system 500 includes an operating system for managing system resources; non-limiting examples of operating systems include: Linux, Windows™, MACOS™, BlackBerry OS™, iOS″, and other functionally-equivalent operating systems, as well as application software running on top of the operating system for managing data storage and optimization in accordance with example instances of the present disclosure. In this example, system 500 also includes network interface cards (NICs) 520 and 521 connected to the peripheral bus for providing network interfaces to external storage, such as Network Attached Storage (NAS) and other computer systems that can be used for distributed parallel processing.

[0209] FIG. 6 is a diagram showing a network 600 with a plurality of computer systems 602a, and 602b, a plurality of cell phones and personal data assistants 602c, and Network Attached Storage (NAS) 604a, and 604b. In example instances, systems 602a, 602b, and 602c can manage data storage and optimize data access for data stored in Network Attached Storage (NAS) 604a and 604b. A mathematical model can be used for the data and be evaluated using distributed parallel processing across computer systems 602a, and 602b, and cell phone and personal data assistant systems 602c. Computer systems 602a, and 602b, and cell phone and personal data assistant systems 602c can also provide parallel processing for adaptive data restructuring of the data stored in Network Attached Storage (NAS) 604a and 604b. FIG. 6 illustrates an example only, and a wide variety of other computer architectures and systems can be used in conjunction with the various instances of the present disclosure. For example, a blade server can be used to provide parallel processing. Processor blades can be connected through a back plane to provide parallel processing. Storage can also be connected to the back plane or as Network Attached Storage (NAS) through a separate network interface. In some example instances, processors can maintain separate memory spaces and transmit data through network interfaces, back plane or other connectors for parallel processing by other processors. In other instances, some or all of the processors can use a shared virtual address memory space.

[0210] FIG. 7 is a block diagram of a multiprocessor computer system 700 using a shared virtual address memory space in accordance with an example instance. The system includes a plurality of processors 702a-f that can access a shared memory subsystem 704. The system incorporates a plurality of programmable hardware memory algorithm processors (MAPs) 706a-f in the memory subsystem 704. Each MAP 706a-f can comprise a memory 708a-f and one or more field programmable gate arrays (FPGAs) 710a-f The MAP provides a configurable functional unit and particular algorithms or portions of algorithms can be provided to the FPGAs 710a-f for processing in close coordination with a respective processor. For example, the MAPs can be used to evaluate algebraic expressions regarding the data model and to perform adaptive data restructuring in example instances. In this example, each MAP is globally accessible by all of the processors for these purposes. In one configuration, each MAP can use Direct Memory Access (DMA) to access an associated memory 708a-f, allowing it to execute tasks independently of, and asynchronously from the respective microprocessor 702a-f. In this configuration, a MAP can feed results directly to another MAP for pipelining and parallel execution of algorithms.

[0211] The above computer architectures and systems are examples only, and a wide variety of other computer, cell phone, and personal data assistant architectures and systems can be used in connection with example instances, including systems using any combination of general processors, co-processors, FPGAs and other programmable logic devices, system on chips (SOCs), application specific integrated circuits (ASICs), and other processing and logic elements. In some instances, all or part of the computer system can be implemented in software or hardware. Any variety of data storage media can be used in connection with example instances, including random access memory, hard drives, flash memory, tape drives, disk arrays, Network Attached Storage (NAS) and other local or distributed data storage devices and systems.

[0212] In example instances, the computer system can be implemented using software modules executing on any of the above or other computer architectures and systems. In other instances, the functions of the system can be implemented partially or completely in firmware, programmable logic devices such as field programmable gate arrays (FPGAs) as referenced in FIG. 5, system on chips (SOCs), application specific integrated circuits (ASICs), or other processing and logic elements. For example, the Set Processor and Optimizer can be implemented with hardware acceleration through the use of a hardware accelerator card, such as accelerator card 522 illustrated in FIG. 5.

[0213] The following examples are set forth to illustrate more clearly the principle and practice of embodiments disclosed herein to those skilled in the art and are not to be construed as limiting the scope of any claimed embodiments. Unless otherwise stated, all parts and percentages are on a weight basis.

### EXAMPLES

[0214] The following examples are given for the purpose of illustrating various embodiments of the disclosure and are not meant to limit the present disclosure in any fashion. The present examples, along with the methods described herein are presently representative of preferred embodiments, are exemplary, and are not intended as limitations on the scope of the disclosure. Changes therein and other uses which are encompassed within the spirit of the disclosure as defined by the scope of the claims will occur to those skilled in the art.

### Example 1: Functionalization of a Device Surface

[0215] A device was functionalized to support the attachment and synthesis of a library of polynucleotides. The device surface was first wet cleaned using a piranha solution comprising 90% H2504 and 10% H₂O₂ for 20 minutes. The device was rinsed in several beakers with DI water, held under a DI water gooseneck faucet for 5 min, and dried with N2. The device was subsequently soaked in NH₄OH (1:100; 3 mL:300 mL) for 5 min, rinsed with DI water using a handgun, soaked in three successive beakers with DI water for 1 min each, and then rinsed again with DI water using the handgun. The device was then plasma cleaned by exposing the device surface to O₂. A SAMCO PC-300 instrument was used to plasma etch O₂ at 250 watts for 1 min in downstream mode.

[0216] The cleaned device surface was actively functionalized with a solution comprising N-(3-triethoxysilylpropyl)-4-hydroxybutyramide using a YES-1224P vapor deposition oven system with the following parameters: 0.5 to 1 torr, 60 min, 70° C., 135° C. vaporizer. The device surface was resist coated using a Brewer Science 200× spin coater. SPR™ 3612 photoresist was spin coated on the device at 2500 rpm for 40 sec. The device was pre-baked for 30 min at 90° C. on a Brewer hot plate. The device was subjected to photolithography using a Karl Suss MA6 mask aligner instrument. The device was exposed for 2.2 sec and developed for 1 min in MSF 26A. Remaining developer was rinsed with the handgun and the device soaked in water for 5 min. The device was baked for 30 min at 100° C. in the oven, followed by visual inspection for lithography defects using a Nikon L200. A descum process was used to remove residual resist using the SAMCO PC-300 instrument to O₂ plasma etch at 250 watts for 1 min.

[0217] The device surface was passively functionalized with a 100 μL solution of perfluorooctyltrichlorosilane mixed with 10 μL light mineral oil. The device was placed in a chamber, pumped for 10 min, and then the valve was closed to the pump and left to stand for 10 min. The chamber was vented to air. The device was resist stripped by performing two soaks for 5 min in 500 mL NMP at 70° C. with ultrasonication at maximum power (9 on Crest system). The device was then soaked for 5 min in 500 mL isopropanol at room temperature with ultrasonication at maximum power. The device was dipped in 300 mL of 200 proof ethanol and blown dry with N2. The functionalized surface was activated to serve as a support for polynucleotide synthesis.

### Example 2: Synthesis of a 50-Mer Sequence on an Oligonucleotide Synthesis Device

[0218] A two dimensional oligonucleotide synthesis device was assembled into a flowcell, which was connected to a flowcell (Applied Biosystems (ABI394 DNA Synthesizer”). The two-dimensional oligonucleotide synthesis device was uniformly functionalized with N-(3-TRIETHOXYSILYLPROPYL)-4-HYDROXYBUTYRAMIDE (Gelest) was used to synthesize an exemplary polynucleotide of 50 bp (“50-mer polynucleotide”) using polynucleotide synthesis methods described herein.

[0219] The sequence of the 50-mer was as described in SEQ ID NO.: 3. 5′AGACAATCAACCATTTGGGGTGGACAGCCTTGACCTCTAGACTTCGGCAT ##TTTTTT TTTT3′ (SEQ ID NO.: 3), where # denotes Thymidine-succinyl hexamide CED phosphoramidite (CLP-2244 from ChemGenes), which is a cleavable linker enabling the release of oligos from the surface during deprotection.

[0220] The synthesis was done using standard DNA synthesis chemistry (coupling, capping, oxidation, and deblocking) according to the protocol in Table 3 and an ABI synthesizer.

TABLE 3
Synthesis protocols

| General DNA Synthesis | Table 3 | |
|---|---|---|
| Process Name | Process Step | Time (sec) |
| WASH (Acetonitrile | Acetonitrile System Flush | 4 |
| Wash Flow) | Acetonitrile to Flowcell | 23 |
| | N2 System Flush | 4 |
| | Acetonitrile System Flush | 4 |
| DNA BASE ADDITION | Activator Manifold Flush | 2 |
| (Phosphoramidite + | Activator to Flowcell | 6 |
| Activator Flow) | Activator + | |
| | Phosphoramidite to | 6 |
| | Flowcell | |
| | Activator to Flowcell | 0.5 |
| | Activator + | |
| | Phosphoramidite to | 5 |
| | Flowcell | |
| | Activator to Flowcell | 0.5 |
| | Activator + | |
| | Phosphoramidite to | 5 |
| | Flowcell | |
| | Activator to Flowcell | 0.5 |
| | Activator + | |
| | Phosphoramidite to | 5 |
| | Flowcell | |
| | Incubate for 25 sec | 25 |
| WASH (Acetonitrile | Acetonitrile System Flush | 4 |
| Wash Flow) | Acetonitrile to Flowcell | 15 |
| | N2 System Flush | 4 |
| | Acetonitrile System Flush | 4 |
| DNA BASE ADDITION | Activator Manifold Flush | 2 |
| (Phosphoramidite + | Activator to Flowcell | 5 |
| Activator Flow) | Activator + | 18 |
| | Phosphoramidite to | |
| | Flowcell | |
| | Incubate for 25 sec | 25 |
| WASH (Acetonitrile | Acetonitrile System Flush | 4 |
| Wash Flow) | Acetonitrile to Flowcell | 15 |
| | N2 System Flush | 4 |
| | Acetonitrile System Flush | 4 |
| CAPPING (CapA + | CapA + B to Flowcell | 15 |
| B, 1:1, Flow) | | |
| WASH (Acetonitrile | Acetonitrile System Flush | 4 |
| Wash Flow) | Acetonitrile to Flowcell | 15 |
| | Acetonitrile System Flush | 4 |
| OXIDATION | Oxidizer to Flowcell | 18 |
| (Oxidizer Flow) | | |
| WASH (Acetonitrile | Acetonitrile System Flush | 4 |
| Wash Flow) | N2 System Flush | 4 |
| | Acetonitrile System Flush | 4 |
| | Acetonitrile to Flowcell | 15 |
| | Acetonitrile System Flush | 4 |
| | Acetonitrile to Flowcell | 15 |
| | N2 System Flush | 4 |
| | Acetonitrile System Flush | 4 |
| | Acetonitrile to Flowcell | 23 |
| | N2 System Flush | 4 |
| | Acetonitrile System Flush | 4 |
| DEBLOCKING | Deblock to Flowcell | 36 |
| (Deblock Flow) | | |
| WASH (Acetonitrile | Acetonitrile System Flush | 4 |
| Wash Flow) | N2 System Flush | 4 |
| | Acetonitrile System Flush | 4 |
| | Acetonitrile to Flowcell | 18 |
| | N2 System Flush | 4.13 |
| | Acetonitrile System Flush | 4.13 |
| | Acetonitrile to Flowcell | 15 |

[0221] The phosphoramidite/activator combination was delivered similar to the delivery of bulk reagents through the flowcell. No drying steps were performed as the environment stays “wet” with reagent the entire time.

[0222] The flow restrictor was removed from the ABI 394 synthesizer to enable faster flow. Without flow restrictor, flow rates for amidites (0.1M in ACN), Activator, (0.25M Benzoylthiotetrazole (“BTT”; 30-3070-xx from GlenResearch) in ACN), and Ox (0.02M 12 in 20% pyridine, 10% water, and 70% THF) were roughly ˜100 uL/sec, for acetonitrile (“ACN”) and capping reagents (1:1 mix of CapA and CapB, wherein CapA is acetic anhydride in THF/Pyridine and CapB is 16% 1-methylimidizole in THF), roughly ˜200 uL/sec, and for Deblock (3% dichloroacetic acid in toluene), roughly ˜300 uL/sec (compared to ˜50 uL/sec for all reagents with flow restrictor). The time to completely push out Oxidizer was observed, the timing for chemical flow times was adjusted accordingly and an extra ACN wash was introduced between different chemicals. After polynucleotide synthesis, the chip was deprotected in gaseous ammonia overnight at 75 psi. Five drops of water were applied to the surface to recover polynucleotides. The recovered polynucleotides were then analyzed on a BioAnalyzer small RNA chip.

### Example 3: Synthesis of a 100-Mer Sequence on an Oligonucleotide Synthesis Device

[0223] The same process as described in Example 2 for the synthesis of the 50-mer sequence was used for the synthesis of a 100-mer polynucleotide (“100-mer polynucleotide”; 5′ CGGGATCCTTATCGTCATCGTCGTACAGATCCCGACCCATTTGCTGTCCACCAGTCATG CTAGCCATACCATGATGATGATGATGATGAGAACCCCGCAT ##TTTTTTTTTT3′, where # denotes Thymidine-succinyl hexamide CED phosphoramidite (CLP-2244 from ChemGenes); SEQ ID NO.: 4) on two different silicon chips, the first one uniformly functionalized with N-(3-TRIETHOXYSILYLPROPYL)-4-HYDROXYBUTYRAMIDE and the second one functionalized with 5/95 mix of 11-acetoxyundecyltriethoxysilane and n-decyltriethoxysilane, and the polynucleotides extracted from the surface were analyzed on a BioAnalyzer instrument.

[0224] All ten samples from the two chips were further PCR amplified using a forward (5′ATGCGGGGTTCTCATCATC3′; SEQ ID NO.: 5) and a reverse (5′CGGGATCCTTATCGTCATCG3; SEQ ID NO.: 6) primer in a 50 uL PCR mix (25 uL NEB Q5 mastermix, 2.5 uL 10 uM Forward primer, 2.5 uL 10 uM Reverse primer, 1 uL polynucleotide extracted from the surface, and water up to 50 uL) using the following thermalcycling program:

[0225] 98° C., 30 sec

[0226] 98° C., 10 sec; 63° C., 10 sec; 72° C., 10 sec; repeat 12 cycles

[0227] 72° C., 2 min

[0228] The PCR products were also run on a BioAnalyzer, demonstrating sharp peaks at the 100-mer position. Next, the PCR amplified samples were cloned, and Sanger sequenced. Table 4 summarizes the results from the Sanger sequencing for samples taken from spots 1-5 from chip 1 and for samples taken from spots 6-10 from chip 2.

TABLE 4
Sequencing results

| Spot | Error rate | Cycle efficiency |
|---|---|---|
| 1 | 1/763 bp | 99.87% |
| 2 | 1/824 bp | 99.88% |
| 3 | 1/780 bp | 99.87% |
| 4 | 1/429 bp | 99.77% |
| 5 | 1/1525 bp | 99.93% |
| 6 | 1/1615 bp | 99.94% |
| 7 | 1/531 bp | 99.81% |
| 8 | 1/1769 bp | 99.94% |
| 9 | 1/854 bp | 99.88% |
| 10 | 1/1451 bp | 99.93% |

[0229] Thus, the high quality and uniformity of the synthesized polynucleotides were repeated on two chips with different surface chemistries. Overall, 89% of the 100-mers that were sequenced were perfect sequences with no errors, corresponding to 233 out of 262.

[0230] Table 5 summarizes error characteristics for the sequences obtained from the polynucleotide samples from spots 1-10.

TABLE 5
Error characteristics

| Sample ID/ | OSA_ | OSA_ | OSA_ | OSA_ | OSA_ | OSA_ | OSA_ | OSA_ | OSA_ | OSA_ |
|---|---|---|---|---|---|---|---|---|---|---|
| Spot no. | 0046/1 | 0047/2 | 0048/3 | 0049/4 | 0050/5 | 0051/6 | 0052/7 | 0053/8 | 0054/9 | 0055/10 |
| Total | 32 | 32 | 32 | 32 | 32 | 32 | 32 | 32 | 32 | 32 |
| Sequences | | | | | | | | | | |
| Sequencing | 25 of 28 | 27 of 27 | 26 of 30 | 21 of 23 | 25 of 26 | 29 of 30 | 27 of 31 | 29 of 31 | 28 of 29 | 25 of 28 |
| Quality | | | | | | | | | | |
| Oligo | 23 of 25 | 25 of 27 | 22 of 26 | 18 of 21 | 24 of 25 | 25 of 29 | 22 of 27 | 28 of 29 | 26 of 28 | 20 of 25 |
| Quality | | | | | | | | | | |
| ROI Match | 2500 | 2698 | 2561 | 2122 | 2499 | 2666 | 2625 | 2899 | 2798 | 2348 |
| Count | | | | | | | | | | |
| ROI | 2 | 2 | 1 | 3 | 1 | 0 | 2 | 1 | 2 | 1 |
| Mutation | | | | | | | | | | |
| ROI Multi | 0 | 0 | 0 | 0 | 0 | 0 | 0 | 0 | 0 | 0 |
| Base | | | | | | | | | | |
| Deletion | | | | | | | | | | |
| ROI Small | 1 | 0 | 0 | 0 | 0 | 0 | 0 | 0 | 0 | 0 |
| Insertion | | | | | | | | | | |
| ROI Single | 0 | 0 | 0 | 0 | 0 | 0 | 0 | 0 | 0 | 0 |
| Base | | | | | | | | | | |
| Deletion | | | | | | | | | | |
| Large | 0 | 0 | 1 | 0 | 0 | 1 | 1 | 0 | 0 | 0 |
| Deletion | | | | | | | | | | |
| Count | | | | | | | | | | |
| Mutation: | 2 | 2 | 1 | 2 | 1 | 0 | 2 | 1 | 2 | 1 |
| G > A | | | | | | | | | | |
| Mutation: | 0 | 0 | 0 | 1 | 0 | 0 | 0 | 0 | 0 | 0 |
| T > C | | | | | | | | | | |
| ROI Error | 3 | 2 | 2 | 3 | 1 | 1 | 3 | 1 | 2 | 1 |
| Count | | | | | | | | | | |
| ROI Error | Err: ~1 | Err: ~1 | Err: ~1 | Err: ~1 | Err: ~1 | Err: ~1 | Err: ~1 | Err: ~1 | Err: ~1 | Err: ~1 |
| Rate | in 834 | in 1350 | in 1282 | in 708 | in 2500 | in 2667 | in 876 | in 2900 | in 1400 | in 2349 |
| ROI Minus | MP Err: | MP Err: | MP Err: | MP Err: | MP Err: | MP Err: | MP Err: | MP Err: | MP Err: | MP Err: |
| Primer | ~1 in 763 | ~1 in 824 | ~1 in 780 | ~1 in 429 | ~1 in 1525 | ~1 in 1615 | ~1 in 531 | ~1 in 1769 | ~1 in 854 | ~1 in 1451 |
| Error Rate | | | | | | | | | | |

### Example 4: Design of GPCR-Focused Antibody Library is Based on GPCR Binding Motifs and GPCR Antibodies

[0231] This Example describes the design of chemokine receptor antibody libraries.

[0232] All known GPCR interactions, which include interactions of GPCRs with ligands, peptides, antibodies, endogenous extracellular loops and small molecules were analyzed to map the GPCR binding molecular determinants. Crystal structures of almost 150 peptides, ligand or antibodies bound to ECDs of around 50 GPCRs (http://www.gperdb.org) were used to identify GPCR binding motifs. Over 1000 GPCR binding motifs were extracted from this analysis. In addition, by analysis of all solved structures of GPCRs (zhanglab.ccmb.med.umich.edu/GPCR-EXP/), over 2000 binding motifs from endogenous extracellular loops of GPCRs were identified. Finally, by analysis of structures of over 100 small molecule ligands bound to GPCR, a reduced amino acid library of 5 amino acids (Tyr, Phe, His, Pro and Gly) that may be able to recapitulate many of the structural contacts of these ligands was identified. A sub-library with this reduced amino acid diversity was placed within a CxxxxxC motif. In total, over 5000 GPCR binding motifs were identified (FIGS. 9A-9E). These binding motifs were placed in one of five different stem regions: CARDLRELECEEWTxxxxxSRGPCVDPRGVAGSFDVW, CARDMYYDFxxxxxEVVPADDAFDIW, CARDGRGSLPRPKGGPxxxxxYDSSEDSGGAFDIW, CARANQHFxxxxxGYHYYGMDVW, CAKHMSMQxxxxxRADLVGDAFDVW.

[0233] These stem regions were selected from structural antibodies with ultra-long HCDR3s. Antibody germlines were specifically chosen to tolerate these ultra-long HCDR3s. Structure and sequence analysis of human antibodies with longer than 21 amino acids revealed a V-gene bias in antibodies with long CDR3s. Finally, the germline IGHV (IGHV1-69 and IGHV3-30), IGKV (IGKV1-39 and IGKV3-15) and IGLV (IGLV1-51 and IGLV2-14) genes were chosen based on this analysis.

[0234] In addition to HCDR3 diversity, limited diversity was also introduced in the other 5 CDRs. There were 416 HCDR1 and 258 HCDR2 variants in the IGHV1-69 domain; 535 HCDR1 and 416 HCDR2 variants in the IGHV3-30 domain; 490 LCDR1, 420 LCDR2 and 824 LCDR3 variants in the IGKV1-39 domain; 490 LCDR1, 265 LCDR2 and 907 LCDR3 variants in the IGKV3-15 domain; 184 LCDR1, 151 LCDR2 and 824 LCDR3 variants in the IGLV1-51 domain; 967 LCDR1, 535 LCDR2 and 922 LCDR3 variants in the IGLV2-14 domain (FIG. 10). These CDR variants were selected by comparing the germline CDRs with the near-germline space of single, double and triple mutations observed in the CDRs within the V-gene repertoire of at least two out of 12 human donors. All CDRs have were pre-screened to remove manufacturability liabilities, cryptic splice sites or nucleotide restriction sites. The CDRs were synthesized as an oligo pool and incorporated into the selected antibody scaffolds. The heavy chain (V_{H}) and light chain (V_{L}) genes were linked by (G₄S)₃ linker. The resulting scFv (V_{H}-linker-V_{L}) gene pool was cloned into a phagemid display vector at the N-terminal of the M13 gene-3 minor coat protein. The final size of the GPCR library is 1×10¹⁰ in a scFv format. Next-generation sequencing (NGS) was performed on the final phage library to analyze the HCDR3 length distribution in the library for comparison with the HCDR3 length distribution in B-cell populations from three healthy adult donors. The HCDR3 sequences from the three healthy donors used were derived from a publicly available database with over 37 million B-cell receptor sequences³¹. The HCDR3 length in the GPCR library is much longer than the HCDR3 length observed in B-cell repertoire sequences. On average, the median HCDR3 length in the GPCR library (which shows a biphasic pattern of distribution) is two or three times longer (33 to 44 amino acids) than the median lengths observed in natural B-cell repertoire sequences (15 to 17 amino acids) (FIG. 11). The biphasic length distribution of HCDR3 in the GPCR library is mainly caused by the two groups of stems (8aa, 9aaxxxxx10aa, 12aa) and (14aa, 16aa xxxxx18aa, 14aa) used to present the motifs within HCDR3.

### Example 5: CXCR4 Variants

[0235] This Example shows design and identification of CXCR4 immunoglobulin variants.

[0236] CXCR4 variants were designed similarly as described in Example 4. CXCR4-expressing and non-expressing cells were harvested for 0.1-0.2 million cells per sample. Cells were blocked with 1% FBS in PBS for 1 hour at 4 C, and incubated with a 3-fold titration of IgGs or peptides from 100 nM for 1 hour at 4 C. After incubation and washing, cells were incubated with an anti-hIgG secondary-APC labeled at 1:500 dilution for 30 minutes at 4 C, and detected by flow cytometry for cell surface binding. Data is seen in FIG. 12.

[0237] The CXCR4 variants were biotinylated and cyclized using the following format: (Biotin-PEG2)-OH]-GS-YRKCRGGRRWCYQK-NH2. The biotinylated and cyclized sequences are seen in Table 6 and FIG. 13. The CXCR4-249-1 sequence was a result of grafting variant CXCR4-7 (YRKCRGGRRWCYRK) onto CXCR4-81-6 (GSGGYRKCRGGRRWCYRKGGGS) where the CDRH3 of CXCR4-81-6 was replaced with that of CXCR4-7.

TABLE 6

| SEQ ID NO | Variant | Sequence |
|---|---|---|
| 7 | CXCR4-1 | (Biotin-PEG2)-GSYRKCRGGRRWCYQK-amide |
| 8 | CXCR4-2 | (Biotin-PEG2)-GSYRKCRGTRRWCYQK-amide |
| 9 | CXCR4-3 | (Biotin-PEG2)-GSYRKCRGGHRWCYQK-amide |
| 10 | CXCR4-4 | (Biotin-PEG2)-GSYRKCRGQRRWCYQK-amide |
| 11 | CXCR4-5 | (Biotin-PEG2)-GSYKKCRGGRRWCYQK-amide |
| 12 | CXCR4-6 | (Biotin-PEG2)-GSYRKCRGGRRWCYAK-amide |
| 13 | CXCR4-7 | (Biotin-PEG2)-GSYRKCRGGRRWCYRK-amide |
| 14 | CXCR4-8 | (Biotin-PEG2)-GSYRMCRGGRRWCYQK-amide |
| 15 | CXCR4-9 | (Biotin-PEG2)-GSYRRCRGGRRWCYQK-amide |
| 16 | CXCR4-10 | (Biotin-PEG2)-GSYRKCRGGKRWCYQK-amide |
| 17 | CXCR4-11 | (Biotin-PEG2)-GSYRKCRGGRKWCYQK-amide |
| 18 | CXCR4-12 | (Biotin-PEG2)-GSYRKCRGMRRWCYQK-amide |
| 19 | CXCR4-13 | (Biotin-PEG2)-GSYRKCRGGRRWCYNK-amide |
| 20 | CXCR4-14 | (Biotin-PEG2)-GSYRKCRGGRRWCFQK-amide |
| 21 | CXCR4-15 | (Biotin-PEG2)-GSYRWCRGGRRWCYQK-amide |
| 22 | CXCR4-16 | (Biotin-PEG2)-GSYRKCRGIRRWCYQK-amide |
| 23 | CXCR4-17 | (Biotin-PEG2)-GSYRKCKGGRRWCYQK-amide |

[0238] cAMP assays using the CXCR4 variants were performed. The cAMP assays were performed using the cAMP Hunter™ eXpress GPCR Assays according to manufacturer's protocol. Gi-coupled CXCR4 expressing cells were seeded at 15000 cells per well in 96-well plate one day before the assay treatment. Sixteen hours later, the cells were incubated with fixed or titration of IgG from 100 nM at 37 C for 1 hour, followed by forskolin (15 uM) and SDF incubation at 37 C for 30 minutes. cAMP detection reagents were added and the level was detected 16 hours later to evaluate IgG function using DisvocerX PathHunter cAMP detection kit. Data from the cAMP assays are seen in FIGS. 14A-14B.

[0239] Ligand binding assays with the CXCR4 variants were performed. Briefly, the ligand binding assays were performed using the Tag-lite® Chemokine CXCR4 Receptor Ligand Binding Assay according to the manufacturer's protocol. The Tag-lite® Chemokine CXCR4 cells transiently expressing the chemokine CXCR4 receptor were labeled with Terbium for conducting receptor binding studies on the CXCR4 receptor. Cells were pre-incubated with 100 nM peptides/IgG, followed by radio ligand treatment from 200 nM, 3× titration (FIG. 15A). Various ligand titrations were assayed in the ligand binding assay (FIG. 15B). Cells were pre-incubated with 100 nM peptides/IgG, followed by radio ligand treatment of 50 nM (FIG. 15C). Various peptide/IgG titrations were assayed in the ligand binding assay (FIG. 15D).

[0240] The CXCR4-81-6 variant was tested in flow titration and cAMP assays. Briefly, for the flow titration assay, target expressing and non-expressing cells were incubated with a titration of IgG including CXCR4-81-6 and then detected with an anti-hIgG secondary-APC labeled antibody. pGPCR-12 was used as a control IgG. Data is seen in FIG. 16A. For the cAMP assay, Gi-coupled CXCR4 expressing cells were incubated with IgG, followed by forskolin and SDF treatment. cAMP levels were detected to evaluate IgG function and the IC50 of CXCR4-81-6 was determined to be 0.9 nM (FIG. 16B).

### Example 6. CXCR5 Variants

[0241] This Example shows design and identification of CXCR5 immunoglobulin variants.

[0242] CXCR5 variants were designed similarly as described in Example 4. CXCR5-expressing and non-expressing cells were harvested for 0.1-0.2 million cells per sample. Cells were blocked with 1% FBS in PBS for 1 hour at 4 C, and incubated with a 3-fold titration of IgGs from 100 nM for 1 hour at 4 C. After incubation and washing, cells were incubated with an anti-hIgG secondary-APC labeled at 1:500 dilution for 30 minutes at 4 C, and detected by flow cytometry for cell surface binding. Data is seen in FIGS. 17A-17C.

[0243] CXCR5 variant CXCR5-1-107 was used to generate variants and tested in titration assays. The heavy chain from variant CXCR5-1-107 was used. Data is seen in FIG. 17D.

### Example 7. Exemplary Sequences

TABLE 7
CXCR4 Variable Heavy (VH) Chain Sequences

| SEQ | | |
|---|---|---|
| ID NO | Variant | Sequence |
| 24 | CXCR4-81-6 | EVQLVESGGGLVQAGGSLRLSCAASGRTFSSYAMGW |
| | | FRQAPGKEREFVAAISWSGGSTYYADSVKGRFTISAD |
| | | NAKNTVYLQMNSLKPEDTAVYYCAAARGYWRWRL |
| | | GRRYDYWGQGTQVTVSS |
| 25 | CXCR4-249-1 | EVQLVESGGGLVQAGGSLRLSCAASGRTFSSYAMGW |
| | | FRQAPGKEREFVAAISWSGGSTYYADSVKGRFTISAD |
| | | NAKNTVYLQMNSLKPEDTAVYYCGSGGYRKCRGGR |
| | | RWCYRKGGGSWGQGTQVTVSS |
| 26 | CXCR4-12 | EVQLVESGGGLVQPGGSLRLSCAASGFTFSDYYMSW |
| | | VRQAPGKGLEWVGFIRHKANFETTEYSTSVKGRFTIS |
| | | RDDSKNSLYLQMNSLKTEDTAVYYCARDLPGFAYW |
| | | GQGTLVTVSS |
| 27 | CXCR4-81-5 | EVQLVESGGGLVQAGGSLRLSCAASGRTFSSYGMGW |
| | | FRQAPGKERELVAAINWSGGRTSYADSVKGRFTISAD |
| | | NAKNTVYLQMNSLKPEDTAVYYCATGRGYWRWRLG |
| | | RAYDYWGQGTQVTVSS |
| 28 | CXCR4-81-9 | EVQLLESGGGLVQPGGSLRLSCAASGFTFRSYATSWV |
| | | RQAPGKGLEWVSTISGSGGSTHYADSVKGRFTISRDN |
| | | SKNTLYLQMNSLRAEDTAVYYCARGPRRWLLSRARG |
| | | SFDIWGQGTLVTVSS |

TABLE 8
CXCR4 Variable Light (VL) Chain Sequences

| SEQ | | |
|---|---|---|
| ID NO | Variant | Sequence |
| 29 | CXCR4-81-6 | DIQMTQSPSSLSASVGDRVTITCRASQSVTTYLNWYQ |
| | | QKPGKAPKLLIYGSSNLQSGVPSRFSGSGSGTDFTLTIS |
| | | SLQPEDFATYYCQQGYSTPWTFGGGTKVEIKR |
| 30 | CXCR4-249-1 | DIQMTQSPSSLSASVGDRVTITCRASQSVTTYLNWYQ |
| | | QKPGKAPKLLIYGSSNLQSGVPSRFSGSGSGTDFTLTIS |
| | | SLQPEDFATYYCQQGYSTPWTFGGGTKVEIKR |
| 31 | CXCR4-12 | DIVMTQSPDSLAVSLGERATINCKSSQSLFNSHTRKNY |
| | | LAWYQQKPGQPPKLLIYWASARGSGVPDRFSGSGSGT |
| | | DFTLTISSLQAEDVAVYYCKQSFNLRTFGGGTKVEIK |
| 32 | CXCR4-81-5 | DIQMTQSPSSLSASVGDRVTITCRASQNIASYLNWYQ |
| | | QKPGKAPKLLIYAASTLQGGVPSRFSGSGSGTDFTLTI |
| | | SSLQPEDFATYYCQQSYSLPYTFGGGTKVEIK |
| 33 | CXCR4-81-9 | DIQMTQSPSSLSASVGDRVTITCRASQSIGGYLNWYQ |
| | | QKPGKAPKLLIYAASRLQSGVPSRFSGSGSGTDFTLTIS |
| | | SLQPEDFATYYCQQSHSFPRTFGGGTKVEIK |

TABLE 9
CXCR5 Variable Heavy (VH) Chain Sequences

| SEQ | | |
|---|---|---|
| ID NO | Variant | Sequence |
| 34 | CXCR5-1-1 | EVQLVESGGGLVQPGGSLRLSCAASGFTFSDYWMHWVRQAPGK |
| | | GLEWVSVISPDGSITYYPDSVKGRFTISRDNSKNTLYLQMNSLRA |
| | | EDTAVYYCARKDVWVIFSTHDGAYGFDVWGQGTLVTVSS |
| 35 | CXCR5-1-2 | EVQLVESGGGLVQPGGSLRLSCAASGRAFIAYAMGWFRQAPGK |
| | | EREMVAAISWSGGITWYADSVKGRFTISADNSKNTAYLQMNSL |
| | | KPEDTAVYYCAAASPGGAINYGRGYDWGQGTLVTVSS |
| 36 | CXCR5-1-3 | EVQLVESGGGLVQPGGSLRLSCAASGFTFSSYGMHWVRQAPGK |
| | | GLEWVAVISPNGGNTYYPDSVKGRFTISRDNSKNTLYLQMNSLR |
| | | AEDTAVYYCARHDHDYYAFDYWGQGTLVTVSS |
| 37 | CXCR5-1-4 | EVQLVQSGAEVKKPGSSVKVSCKASGGTFSSYAMSWVRQAPGQ |
| | | GLEWIGTINPGDGYTHYADKFKGRVTITRDTSTSTVYMELSRLRS |
| | | EDTAVYYCARHTSSNGVYSTWFAYWGQGTLVTVSS |
| 38 | CXCR5-1-5 | EVQLVESGGGLVQPGGSLRLSCAASGGTFSLYAMGWFRQAPGK |
| | | EREFVAAISWSGGSTIYADSVKGRFTISADNIKNTAYLHMNSLKP |
| | | EDTAVYYCASNESDAYNWGQGTLVTVSS |
| 39 | CXCR5-1-6 | EVQLVESGGGLVQPGGSLRLSCAASGFTFSSYGMHWVRQAPGK |
| | | GLEWVAYISYSGGEKYYADSVKGRFTISRDNSKNTLYLQMNSLR |
| | | AEDTAVYYCARDDDGGDAFDYWGQGTLVTVSS |
| 40 | CXCR5-1-7 | EVQLVESGGGLVQPGGSLRLSCAASGRAFIAYAMGWFRQAPGK |
| | | EREMVAAISWSGGITWYADSVKGRFTISADNSKNTAYLQMNSL |
| | | KPEDTAVYYCAAASPGGAINYGRGYDWGQGTLVTVSS |
| 41 | CXCR5-1-8 | EVQLVQSGAEVKKPGSSVKDSCKASGGTFSDYAMSWVRQAPGQ |
| | | GLEWIGRINPYDGYTHYNDKFKGRGTITRDTSTSTVYMELSSLRS |
| | | EDTAVYYCARDYSSSFVFHAMDYWGQGTLVTVSS |
| 42 | CXCR5-1-9 | EVQLVESGGGLVQPGGSLRLSCAASGFTFSDYAMGWVRQAPGK |
| | | GLEWVSYISYDGSNTYYPDSVKGRFTISRDNSKNTLYLQMNSLR |
| | | AEDTAVYYCARIRTNYFGFDYWGQGTLVTVSS |
| 43 | CXCR5-1-10 | EVQLVESGGGLVQPGGSLRLSCAASGRAFIAYAMGWFRQAPGK |
| | | EREMVAAISWSGGITWYADSVKGRFTISADNSKNTAYLQMNSL |
| | | KPEDTAVYYCAAASPGGAINYGRGYDWGQGTLVTVSS |
| 44 | CXCR5-1-11 | EVQLVESGGGLVQPGGSLRLSCAASGRAFIAYAMGWFRQAPGK |
| | | EREMVAAISWSGGITWYADSVKGRFTISADNSKNTAYLQMNSL |
| | | KPEDTAVYYCAAASPGGAINYGRGYDWGQGTLVTVSS |
| 45 | CXCR5-1-12 | EVQLVESGGGLVQPGGSLRLSCAASGFTFSDYAMSLVRQAPGKG |
| | | LEWVSVISYSGSETYYPDSVKGRFTISRDNSKNTLYLQMNSLRAE |
| | | DTAVYYCARHLTNYDPFDYWGQGTLVTVSS |
| 46 | CXCR5-1-13 | EVQLVESGGGLVQPGGSLRLSCAASGFTFSDYGMSWVRQAPGK |
| | | GLEWVSYISPDSVKGRFTISRDNSKNTLYLQMNSLRAEDTAVYY |
| | | CARGDTNWFAFDYWGQGTLVTVSS |
| 47 | CXCR5-1-14 | EVQLVESGGGLVQPGGSLRLSCAASGFTFSNYAMHWVRQAPGK |
| | | GLEWVSVISPNGGNKYYPDSVKGRFTISRDNSKNTLYLQMNSLR |
| | | AEDTAWYYCARILTGGYPFDYWGQGTLVTVSS |
| 48 | CXCR5-1-15 | EVQLVESGGGLVQPGGSLRLSCAASGGTFSLYAMGWFRQAPGK |
| | | EREFVAAISWSGGSTIYADSVKGRFTISADNSKNTAYLQMNSLKP |
| | | EDTAVYYCASNESDAYNWGQGTLVTVSS |
| 49 | CXCR5-1-16 | EVQLVESGGGLVQPGGSLRLSCAASGFTFSDYGMGWVRQAPGK |
| | | GLEWVSVISYDGSNTYYPDSVKGRFTISRDNSKNTLYLQMNSLR |
| | | AEDTAVYYCARHRHYGYPFDYWGQGTLVTVSS |
| 50 | CXCR5-1-17 | EVKLVESGGGLVQPGGSLRLSCAASGFTFSNYAMSWVRQAPGK |
| | | GLEWVAVISYSGGITYYADSVKGRFTISRDNSKNTLYLQMNSLR |
| | | AEDTAVYYCARHRHYNYAFDYWGQGTLVTVSS |
| 51 | CXCR5-1-18 | EVQLVQSGAEVKKPGSSVKVSCKASGGTFSDYAMHWVRQAPG |
| | | QGLEWIGRIRPGDGYTHYADKFKGRVTITRDTSTSTVYMELSSLR |
| | | SEDTAVYYCARFGHSGRSFAYWGQGTLVTVSS |
| 52 | CXCR5-1-19 | EVQLVESGGGLVQPGGSLRLSCAASGFTFSSYYMHWVRQAPGK |
| | | GLEWVAVISPSGGNKYYPDSVKGRFTISRDNSKNTLYLQMNSLR |
| | | AEDTAVYYCARGKDDRLDYLGYYFDYWGQGTLVTVSS |
| 53 | CXCR5-1-20 | EVQLVESGGGLVQPGGSLRLSCAASGFTFSDYWMGWVRQAPGK |
| | | GLEWVSVISPDGGNKYYADSVKGRFTISRDNSKNTLYLQMNSLR |
| | | AEDTAVYYCARHLDGGDGFDYWGQGTLVTVSS |
| 54 | CXCR5-1-21 | EVQLVESGGGLVQPGGSLRLSCAASGFTFSDYWMSWVRQAPGK |
| | | GLEWVAVISYDGSETYYPDSVKGRFTISRDNSKNTLYLQMNSLR |
| | | AEDTAVYYCARDDRGYFGFDYWGQGTLVTVSS |
| 55 | CXCR5-1-22 | EVQLVESGGGLVQPGGSLRLSCAASGFTFSDYWMGWVRQAPGK |
| | | GLEWVAYISYSGSIKYYADSVKGRFTISRDNSKNTLYLQMNSLR |
| | | AEDTAVYYCARPSYLDSVYGHDGYYTLDVWGQGTLVTVSS |
| 56 | CXCR5-1-23 | EVQLVQSGAEVKKPGSSVKVSCKASGGTFSSYAMSLVRQAPGQ |
| | | GLEWIGTIRPGDGYTHYADKFKGRVTITRDTSTSTVYMELSSLRS |
| | | EDTAVYYCARSLLPNTVTAYMDYWGQGTLVTVSS |
| 57 | CXCR5-1-24 | EVQLVESGGGLVQPGGSLRLSCAASGFTFSSYWMGWVRQAPGK |
| | | GLEWVAYISYDGGITYYPDSVKGRFTISRDNSKNTLYLQMNSLR |
| | | AEDTAVYYCARDDDGWYPFDYWGQGTLVTVSS |
| 58 | CXCR5-1-25 | EVQLVQSGAEVKKPGSSVKVSCKASGGTFSSYWMSWVRQAPG |
| | | QGLEWIGVIRPYDGYTYYAQKFKGRVTITRDTSTSTVYMELSSL |
| | | RSEDTAVYYCARHGYKSNYLSYMDYWGQGTLVTVSS |
| 59 | CXCR5-1-26 | EVQLVESGGGLVQPGGSLRLSCAASGFTFSSYAMGWVRQAPGK |
| | | GLEWVSVISYSGGNTYYPDSVKGRFTISRDNSKNTLYLQMNSLR |
| | | AEDTAVYYCARDDHGWYPFDYWGQGTLVTVSS |
| 60 | CXCR5-1-27 | EVQLVESGGGLVQPGGSLRLSCAASGFTFSDYAMHWVRQAPGK |
| | | GLEWVSYISPSGSIKYYADSVKGRFTISRDNSKNTLYLQMNSLRA |
| | | EDTAVYYCARGRHNNFGFDYWGQGTLVTVSS |
| 61 | CXCR5-1-28 | EVQLVESGGGLVQPGGSLRLSCAASGFTFSNYYMGWVRQAPGK |
| | | GLEWVAYISYDGSIKYYPDSVKGRFTISRDNSKNTLYLQMNSLR |
| | | AEDTAVYYCARILDYYFPFDYWGQGTLVTVSS |
| 62 | CXCR5-1-29 | EVQLVQSGAEVKKPGSSVKVSCKASGGTFSNYYMNWVRQAPG |
| | | QGLEWIGRIRPGNGYTHYADKFKGRVTITRDTSTSTVYMELSSLR |
| | | SEDTAVYYCARSESSFYVYQTAFAYWGQGTLVTVSS |
| 63 | CXCR5-1-30 | EVQLVQSGAEVKKPGSSVKVSCKASGGTFSSYAMSWVRQAPGQ |
| | | GLEWIGVIRPGDGYTKYADKFKGRVTITRDTSTSTVYMELSSLRS |
| | | EDTAVYYCARSGLWYNVFNAMDYWGQGTLVTVSS |
| 64 | CXCR5-1-31 | EVQLVESGGGLVQPGGSLRLSCAASGFTFSDYYMGWVRQAPGK |
| | | GLEWVAYISPSGGNKYYPDSVKGRFTISRDNSKNTLYLQMNSLR |
| | | AEDTAVYYCARKSHYFGFWGNNGARTFDYWGQGTLVTVSS |
| 65 | CXCR5-1-32 | EVQLVESGGGLVQPGGSLRLSCAASGFTFSDYGMSWVRQAPGK |
| | | GLEWVAVISYDGSNKYYADSVKGRFTISRDNSKNTLYLQMNSL |
| | | RAEDTAVYYCARGELNRGDRYGYRYHKHRGMDVWGQGTLVT |
| | | VSS |
| 66 | CXCR5-1-33 | EVQLVQSGAEVKKPGSSVKVSCKASGGTFSNYYMNWVRQAPG |
| | | QGLEWIGTIRPNNGETKYNDKFKGRVTITRDTSTSTVYMELSSLR |
| | | SEDTAVYYCARDLYWNFGGYAMDYWGQGTLVTVSS |
| 67 | CXCR5-1-34 | EVQLVQSGAEVKKPGSSVKVSCKASGGTFSDYAMHWVRQAPG |
| | | QGLEWIGVINPNDGYTKYAQKFKGRVTITRDTSTSTVYMELSSL |
| | | RSEDTAVYYCARSFFYYHYGAFDYWGQGTLVTVSS |
| 68 | CXCR5-1-35 | EVQLVESGGGLVQPGGSLRLSCAASGFTFSSYWMHWVRQAPGK |
| | | GLEWVAVISYDGGNKYYPDSVKGRFTISRDNSKNTLYLQMNSL |
| | | RAEDTAVYYCARIDGYYIRWTYYHARTFDYWGQGTLVTVSS |
| 69 | CXCR5-1-36 | EVQLVQSGAEVKKPGSSVKVSCKASGGTFSSYAMNWVRQAPGQ |
| | | GLEWIGTIRPNNGETKYNQKFKGRVTITRDTSTSTVYMELSSLRS |
| | | EDTAVYYCARPSRPSHYSAFSHPYYMDYWGQGTLVTVSS |
| 70 | CXCR5-1-37 | EVQLVESGGGLVQPGGSLRLSCAASGFTFSDYAMHWVRQAPGK |
| | | GLEWVAYISYSGSNKYYPDSVKGRFTISRDNSKNTLYLQMNSLR |
| | | AEDTAVYYCARGPQSWYGLWGQNFDYWGQGTLVTVSS |
| 71 | CXCR5-1-38 | EVQLVESGGGLVQPGGSLRLSCAASGFTFSNYYMSWVRQAPGK |
| | | GLEWVSVISPSGSETYYADSVKGRFTISRDNSKNTLYLQMNSLR |
| | | AEDTAVYYCARHLDNGFPFDYWGQGTLVTVSS |
| 72 | CXCR5-1-39 | EVQLVESGGGLVQPGGSLRLSCAASGFTFSDYAMHWVRQAPGK |
| | | GLEWVSVISYDGSITYYPDSVKGRFTISRDNSKNTLYLQMNSLRA |
| | | EDTAVYYCARIRHRFILWRNYGARGMDYWGQGTLVTVSS |
| 73 | CXCR5-1-40 | EVQLVESGGGLVQPGGSLRLSCAASGFTFSSYWMSWVRQAPGK |
| | | GLEWVSVISPSGSETYYADSVKGRFTISRDNSKNTLYLQMNSLR |
| | | AEDTAVYYCARDRDRYLDLHRYPFDYWGQGTLVTVSS |
| 74 | CXCR5-1-41 | EVQLVQSGAEVKKPGSSVKVSCKASGGTFSSYAMNWVRQAPGQ |
| | | GLEWIGRINPNNGYTHYADKFKGRVTITRDTSTSTVYMELSSLRS |
| | | EDTAVYYCARLLSKSNNLHAMDYWGQGTLVTVSS |
| 75 | CXCR5-1-42 | EVQLVQSGAEVKKPGSSVKVSCKASGGTFSSYWMSWVRQAPG |
| | | QGLEWIGVIRPGNGYTYYNQKFKGRVTITRDTSTSTVYMELSSL |
| | | RSEDTAVYYCARGGAYYYTSITSHGFQFDYWGQGTLVTVSS |
| 76 | CXCR5-1-43 | EVQLVQSGAEVKKPGSSVKVSCKASGGTFSDYWMHWVRQAPG |
| | | QGLEWIGRIRPYDGYTKYNQKFKGRVTITRDTSTSTVYMELSSLR |
| | | SEDTAVYYCARSTIGYDYGYYGFDYWGQGTLVTVSS |
| 77 | CXCR5-1-44 | EVQLVESGGGLVQPGGSLRLSCAASGFTFSDYAMGWVRQAPGK |
| | | GLEWVSANKYYADSVKGRFTISRDNSKNTLYLQMNSLRAEDTA |
| | | VYYCARRVYWDGFYTQDYYYTLDVWGQGTLVTVSS |
| 78 | CXCR5-1-45 | EVQLVESGGGLVQPGGSLRLSCAASGFTFSDYWMHWVRQAPGK |
| | | GLEWVAYISYNGGITYYPDSVKGRFTISRDNSKNTLYLQMNSLR |
| | | AEDTAVYYCARDTSSWTPLLTFYFDYWGQGTLVTVSS |
| 79 | CXCR5-1-46 | EVQLVESGGGLVQPGGSLRLSCAASGFTFSDYAMHWVRQAPGK |
| | | GLEWVSYISYDGSETYYADSVKGRFTISRDNSKNTLYLQMNSLR |
| | | AEDTAVYYCARHLHDNDAFDYWGQGTLVTVSS |
| 80 | CXCR5-1-47 | EVQLVESGGGLVQPGGSLRLSCAASGFTFSNYGMHWVRQAPGK |
| | | GLEWVAYISYSGGITYYPDSVKGRFTISRDNSKNTLYLQMNSLR |
| | | AEDTAVYYCARHRTDGYPFDYWGQGTLVTVSS |
| 81 | CXCR5-1-48 | EVQLVESGGGLVQPGGSLRLSCAASGFTFSNYWMHWVRQAPGK |
| | | GLEWVSVISYSGGNKYYPDSVKGRFTISRDNSKNTLYLQMNSLR |
| | | AEDTAVYYCARKDGLYDRSGYRHARTFDYWGQGTLVTVSS |
| 82 | CXCR5-1-49 | EVQLVESGGGLVQPGGSLRLSCAASGFTFSDYWMHWVRQAPGK |
| | | GLEWVSYISPSGGEKYYADSVKGRFTISRDNSKNTLYLQMNSLR |
| | | AEDTAVYYCARDEDYYYDGSRFNGGYYGPMDVWGQGTLVTVS |
| | | S |
| 83 | CXCR5-1-50 | EVQLVESGGGLVQPGGSLRLSCAASGFTFSDYWMSWVRQAPGK |
| | | GLEWVAYISPSGGNKYYPDSVKGRFTISRDNSKNTLYLQMNSLR |
| | | AEDTAVYYCARRDYWYSVYTHRYARTFDVWGQGTLVTVSS |
| 84 | CXCR5-1-51 | EVQLVESGGGLVQPGGSLRLSCAASGFTFSNYWMGWVRQAPGK |
| | | GLEWVSVISYDGSITYYPDSVKGRFTISRDNSKNTLYLQMNSLRA |
| | | EDTAVYYCARDRHGNYAFDYWGQGTLVTVSS |
| 85 | CXCR5-1-52 | EVQLVQSGAEVKKPGSSVKVSCKASGGTFSSYYMSWVRQAPGQ |
| | | GLEWIGRIRPYDGYTHYNQKFKGRVTITRDTSTSTVYMELSSLRS |
| | | EDTAVYYCARRGYSRDWFAYWGQGTLVTVSS |
| 86 | CXCR5-1-53 | EVQLVQSGAEVKKPGSSVKVSCKASGGTFSDYWMSWVRQAPG |
| | | QGLEWIGRIRPGDGETYYAQKFKGRVTITRDTSTSTVYMELSSLR |
| | | SEDTAVYYCARLFFSSDDFAFAFDYWGQGTLVTVSS |
| 87 | CXCR5-1-54 | EVQLVESGGGLVQPGGSLRLSCAASGFTFSDYWMGWVRQAPGK |
| | | GLEWVAVISYSGSNTYYPDSVKGRFTISRDNSKNTLYLQMNSLR |
| | | AEDTAVYYCARDLTGYYPFDYWGQGTLVTVSS |
| 88 | CXCR5-1-55 | EVQLVESGGGLVQPGGSLRLSCAASGFTFSDYAMSWVRQAPGK |
| | | GLEWVAYISPSGSNKYYPDSVKGRFTISRDNSKNTLYLQMNSLR |
| | | AEDTAVYYCARDDDGYLDYLRFNFDYWGQGTLVTVSS |
| 89 | CXCR5-1-56 | EVQLVQSGAEVKKPGSSVKVSCKASGGTFSNYWMNWVRQAPG |
| | | QGLEWIGVIRPNNGETHYNQKFKGRVTITRDTSTSTVYMELSSLR |
| | | SEDTAVYYCARLYGPNTVTYYMDYWGQGTLVTVSS |
| 90 | CXCR5-1-57 | EVQLVQSGAEVKKPGSSVKVSCKASGGTFSSYAMHWVRQAPGQ |
| | | GLEWIGRINPNNGETKYAQKFKGRVTITRDTSTSTVYMELSSLRS |
| | | EDTAVYYCARGSAYYHYYYYSHGGAFAYWGQGTLVTVSS |
| 91 | CXCR5-1-58 | EVQLVESGGGLVQPGGSLRLSCAASGFTFSSYYMHWVRQAPGK |
| | | GLEWVAYISPDGGNKYYPDSVKGRFTISRDNSKNTLYLQMNSLR |
| | | AEDTAVYYCARRVHWYGRYTHNYYYGLDVWGQGTLVTVSS |
| 92 | CXCR5-1-59 | EVQLVQSGAEVKKPGSPVKVSCKASGGTFSSYWMNWVRQAPG |
| | | QGLEWIGVINPGDGYTKYNQKFKGRVTITRDTSTSTVYMELSSL |
| | | RSEDTAVYYCARHESGYGVGAYGFAYWGQGTLVTVSS |
| 93 | CXCR5-1-60 | EVQLVQSGAEVKKPGSSVKVSCKASGGTFSDYAMHWVRQAPG |
| | | QGLEWIGVINPYNGYTKYADKFKGRVTITRDTSTSTVYMELSSL |
| | | RSEDTAVYYCARPGEPYDTYITSFGFQMDYWGQGTLVTVSS |
| 94 | CXCR5-1-61 | EVQLVESGGGLVQPGGSLRLSCAASGFTFSNYAMSWVRQAPGK |
| | | GLEWVAVISYDGSEKYYADSVKGRFTISRDNSKNTLYLQMNSLR |
| | | AEDTAVYYCARGRSDYYDLHTHNFDYWGQGTLVTVSS |
| 95 | CXCR5-1-62 | EVQLVQSGAEVKKPGSSVKVSCKASGGTFSSYWMHWVRQAPG |
| | | QGLEWIGRINPGDGYTYYNDKFKGRVTITRDTSTSTVYMELSSL |
| | | RSEDTAVYYCARLESKYDVGSAMDYWGQGTLVTVSS |
| 96 | CXCR5-1-63 | EVQLVESGGGLVQPGGSLRLSCAASGFTFSSYGMSWVRQAPGK |
| | | GLEWVSYISPSGGNTYYADSVKGRFTISRDNSKNTLYLQMNSLR |
| | | AEDTAVYYCARISVRYIRTGNDYARTMDYWGQGTLVTVSS |
| 97 | CXCR5-1-64 | EVQLVESGGGLVQPGGSLRLSCAASGFTFSSYAMGWVRQAPGK |
| | | GLEWVAVISYSGSNKYYADSVKGRFTISRDNSKNTLYLQMNSLR |
| | | AEDTAVYYCARIDHWDGRWGYYHARTMDVWGQGTLVTVSS |
| 98 | CXCR5-1-65 | EVQLVESGGGLVQPGGSLRLSCAASGFTFSSYGMHWVRQAPGK |
| | | GLEWVSVISPNGGETYYPDSVKGRFTISRDNSKNTLYLQMNSLR |
| | | AEDTAVYYCARGTSRYLPLHTYYFDYWGQGTLVTVSS |
| 99 | CXCR5-1-66 | EVQLVESGGGLVQPGGSLRLSCAASGFTFSDYWMHWVRQAPGK |
| | | GLEWVSVISYSGGETYYPDSVKGRFTISRDNSKNTLYLQMNSLR |
| | | AEDTAVYYCARIRTYNYPFDYWGQGTLVTVSS |
| 100 | CXCR5-1-67 | EVQLVQSGAEVKKPGSSVKVSCKASGGTFSNYAMHLVRQAPGQ |
| | | GLEWIGTINPYNGYTYYADKFKGRVTITRDTSTSTVYMELSSLRS |
| | | EDTAVYYCARHYLWYYYFAAMDYWGQGTLVTVSS |
| 101 | CXCR5-1-68 | EVQLVESGGGLVQPGGSLRLSCAASGFTFSSYWMSWVRQAPGK |
| | | GLEWVSVISYSGSNKYYADSVKGRFTISRDNSKNTLYLQMNSLR |
| | | AEDTAVYYCARIDTDNFAFDYWGQGTLVTVSS |
| 102 | CXCR5-1-69 | EVQLVESGGGLVQPGGSLRLSCAASGFTFSDYYMHWVRQAPGK |
| | | GLEWVSYISPDGGIKYYPDSVKGRFTISRDNSKNTLYLQMNSLR |
| | | AEDTAVYYCARDEDYYGIFYGQNHYFGFGMDVWGQGTLVTVS |
| | | S |
| 103 | CXCR5-1-70 | EVQLVQSGAEVKKPGSSVKVSCKASGGTFSSYAMNWVRQAPGQ |
| | | GLEWIGVIRPNNGYTHYNDKFKGRVTITRDTSTSTVYMELSSLRS |
| | | EDTAVYYCARPSAYIDVSYTSFYGYFAYWGQGTLVTVSS |
| 104 | CXCR5-1-71 | EVQLVESGGGLVQPGGSLRLSCAASGFTFSSYWMHWVRQAPGK |
| | | GLEWVSYISPSGGNTYYPDSVKGRFTISRDNSKNTLYLQMNSLR |
| | | AEDTAVYYCARDRDYNFAFDYWSQGTLVTVSS |
| 105 | CXCR5-1-72 | EVQLVESGGGLVQPGGSLRLSCAASGFTFSSYWMSWVRQAPGK |
| | | GLEWVSYISPDGSNKYYADSVKGRFTISRDNSKNTLYLQMNSLR |
| | | AEDTAVYYCARDRLHYGDSWRYNHHKYGGMDVWGQGTLVTV |
| | | SS |
| 106 | CXCR5-1-73 | EVQLVESGGGLVQPGGSLRLSCAASGFTFSNYGMSWVRQAPGK |
| | | GLEWVSYISYDGGNKYYPDSVKGRFTISRDNSKNTLYLQMNSLR |
| | | AEDTAVYYCARIRDYGYGFDYWGQGTLVTVSS |
| 107 | CXCR5-1-74 | EVQLVQSGAEVKKPGSSVKVSCKASGGTFSSYAMNWVRQAPGQ |
| | | GLEWIGVIRPYDGYTHYNDKFKGRVTITRDTSTSTVYMELSSLRS |
| | | EDTAVYYCARSYYKHNNLAYMDYWGQGTLVTVSS |
| 108 | CXCR5-1-75 | EVQLVQSGAEVKKPGSSVKVSCKASGGTFSSYAMNWVRQAPGQ |
| | | GLEWIGRIRPGNGETHYNQKFKGRVTITRDTSTSTVYMELSSLRS |
| | | EDTAVYYCARHLSKYFVTNAMDYWGQGTLVTVSS |
| 109 | CXCR5-1-76 | EVQLVESGGGLVQPGGSLRLSCAASGFTFSNYAMSWVRQAPGK |
| | | GLEWVAVISPDGGIKYYADSVKGRFTISRDNSKNTLYLQMNSLR |
| | | AEDTAVYYCARIVGRDDRSGNDYYRTMDYWGQGTLVTVSS |
| 110 | CXCR5-1-77 | EVQLVESGGGLVQPGGSLRLSCAASGFTFSNYYMHWVRQAPGK |
| | | GLEWVSVISYSGGEKYYPDSVKGRFTISRDNSKNTLYLQMNSLR |
| | | AEDTAVYYCARIDHDNYGFDYWGQGTLVTVSS |
| 111 | CXCR5-1-78 | EVQLVQSGAEVKKPGSSVKVSCKASGGTFSSYYMHWVRQAPGQ |
| | | GLEWIGVIRPYNGYTKYNQKFKGRVTITRDTSTSTVYMELSSLRS |
| | | EDTAVYYCARDFFGNYVYSFWFDYWGQGTLVTVSS |
| 112 | CXCR5-1-79 | EVQLVESGGGLVQPGGSLRLSCAASGFTFSSYYMSWVRQAPGK |
| | | GLEWVSYISYDGGETYYADSVKGRFTISRDNSKNTLYLQMNSLR |
| | | AEDTAVYYCARDELYYYIGWGHDHHFHRGMDVWGQGTLVTV |
| | | SS |
| 113 | CXCR5-1-80 | EVQLVESGGGLVQPGGSLRLSCAASGFTFSDYYMHWVRQAPGK |
| | | GLEWVSVISYSGSEKYYPDSVKGRFTISRDNSKNTLYLQMNSLR |
| | | AEDTAVYYCARGDRGYYSFWTHPFDYWGQGTLVTVSS |
| 114 | CXCR5-1-81 | EVQLVESGGGLVQPGGSLRLSCAASGFTFSDYGMSWVRQAPGK |
| | | GLEWVAYISPDGGEKYYPDSVKGRFTISRDNSKNTLYLQMNSLR |
| | | AEDTAVYYCARDRTNGFGFDYWGQGTLVTVSS |
| 115 | CXCR5-1-82 | EVQLVESGGGLVQPGGSLRLSCAASGFTFSDYWMHWVRQAPGK |
| | | GLEWVAYISPDGGNKYYPDSVKGRFTISRDNSKNTLYLQMNSLR |
| | | AEDTAVYYCARGELHRGSSTRYDFHYYRGMDVWGQGTLVTVS |
| | | S |
| 116 | CXCR5-1-83 | EVQLVESGGGLVQPGGSLRLSCAASGFTFSDYGMHWVRQAPGK |
| | | GLEWVAYISYSGGITYYPDSVKGRFTISRDNSKNTLYLQMNSLR |
| | | AEDTEVYYCARPSYYDSLWRHRYYRTFDVWGQGTLVTVSS |
| 117 | CXCR5-1-84 | EVQLVESGGGLVQPGGSLRLSCAASGFTFSSYAMGWVRQAPGK |
| | | GLEWVAVISPDGSITYYPDSVKGRFTISRDNSKNTLYLQMNSLRA |
| | | EDTAVYYCARHRTDNFPFDYWGQGTLVTVSS |
| 118 | CXCR5-1-85 | EVQLVQSGAEVKKPGSSVKVSCKASGGTFSNYWMSWVRQAPG |
| | | QGLEWIGRINPYNGETYYNDKFKGRVTITRDTSTSTVYMELSSLR |
| | | SEDTAVYYCARSPFGFTYYSTYFAYWGQGTLVTVSS |
| 119 | CXCR5-1-86 | EVQLVESGGGLVQPGGSLRLSCAASGFTFSNYAMHWVRQAPGK |
| | | GLEWVSVISPSGGITYYADSVKGRFTISRDNSKNTLYLQMNSLRA |
| | | EDTAVYYCARPRYLFGRTGNRYYYTLDVWGQGTLVTVSS |
| 120 | CXCR5-1-87 | EVQLVQSGAEVKKPGSSVKVSCKASGGTFSSYWMNWVRQAPG |
| | | QGLEWIGVIRPYDGYTHYNDKFKGRVTITRDTSTSTVYMELSSL |
| | | RSEDTAVYYCARHYSDYTDTSYMDYWGQGTLVTVSS |
| 121 | CXCR5-1-88 | EVQLVESGGGLVQPGGSLRLSCAASGFTFSDYYMHWVRQAPGK |
| | | GLEWVSYISPDGGITYYPDSVKGRFTISRDNSKNTLYLQMNSLRA |
| | | EDTAVYYCARDDTNNDPFDYWGQGTLVTVSS |
| 122 | CXCR5-1-89 | EVQLVESGGGLVQPGGSLRLSCAASGFTFSSYGMSWVRQAPGK |
| | | GLEWVAYISYSGSEKYYADSVKGRFTISRDNSKNTLYLQMNSLR |
| | | AEDTAVYYCARGEGHYYDSTRQRFYFYFPMDVWGQGTLVTVS |
| | | S |
| 123 | CXCR5-1-90 | EVQLVESGGGLVQPGGSLRLSCAASGFTFSDYAMGWVRQAPGK |
| | | GLEWVAVISPSGSNKYYADSVKGRFTISRDNSKNTLYLQMNSLR |
| | | AEDTAVYYCARRRYRFGFWRQHHAYTFDVWGQGTLVTVSS |
| 124 | CXCR5-1-91 | EVQLVQSGAEVKKPGSSVKVSCKASGGTFSNYWMNWVRQAPG |
| | | QGLEWIGVIRPGNGETKYADKFKGRVTITRDTSTSTVYMELSSLR |
| | | SEDTAVYYCARSYLSSYDLYAMDYWGQGTLVTVSS |
| 125 | CXCR5-1-92 | EVQLVESGGGLVQPGGSLRLSCAASGFTFSNYWMHWVRQAPGK |
| | | GLEWVSVISPSGSEKYYPDSVKGRFTISRDNSKNTLYLQMNSLRA |
| | | EDTAVYYCARDKDSNGILHGQNFDYWGQGTLVTVSS |
| 126 | CXCR5-1-93 | EVQLVQSGAEVKKPGSSVKVSCKASGGTFSNYYMSWVRQAPGQ |
| | | GLEWIGRIRPGDGYTYYADKFKGRVTITRDTSTSTVYMELSSLRS |
| | | EDTAVYYCARGYNWARKLVYWGQGTLVTVSS |
| 127 | CXCR5-1-94 | EVQLVESGGGLVQPGGSLRLSCAASGFTFSSYWMSWVRQAPGK |
| | | GLEWVSVISYDGSEKYYPDSVKGRFTISRDNSKNTLYLQMNSLR |
| | | AEDTAVYYCARGKSGWYPLHGQNFDYWGQGTLVTVSS |
| 128 | CXCR5-1-95 | EVQLVQSGAEVKKPGSSVKVSCKASGGTFSSYWMNWVRQAPG |
| | | QGLEWIGVIRPNNGYTHYADKFKGRVTITRDTSTSTVYMELSSL |
| | | RSEDTAVYYCARHFIYYGGFSTGFDYWGQGTLVTVSS |
| 129 | CXCR5-1-96 | EVQLVESGGGLVQPGGSLRLSCAASGFTFSSYYMSWVRQAPGK |
| | | GLEWVSVISPNGGEKYYPDSVKGRFTISRDNSKNTLYLQMNSLR |
| | | AEDTAVYYCARGDQDNGGRLGYYFDYWGQGTLVTVSS |
| 130 | CXCR5-1-97 | EVQLVESGGGLVQPGGSLRLSCAASGFTFSNYWMHWVRQAPGK |
| | | GLEWVAVISYSGGITYYPDSVKGRFTISRDNSKNTLYLQMNSLR |
| | | AEDTAVYYCARDRTNYFPFDYWGQGTLVTVSS |
| 131 | CXCR5-1-98 | EVQLVESGGGLVQPGGSLRLSCAASGFTFSDYYMSWVRQAPGK |
| | | GLEWVSVISPSGGITYYPDSVKGRFTISRDNSKNTLYLQMNSLRA |
| | | EDTAVYYCARISHYVGLWRHYYYRGFDVWGQGTLVTVSS |
| 132 | CXCR5-1-99 | EVQLVQSGAEVKKPGSSVKVSCKASGGTFSDYYMSWVRQAPGQ |
| | | GLEWIGTIRPNNGETKYNQKFKGRVTITRDTSTSTVYMELSSLRS |
| | | EDTAVYYCARLTSRSTDGQFAFDYWGQGTLVTVSS |
| 133 | CXCR5-1-100 | EVQLVESGGGLVQPGGSLRLSCAASGFTFSDYAMGWVRQAPGK |
| | | GLEWVAYISYSGSNTYYPDSVKGRFTISRDNSKNTLYLQMNSLR |
| | | AEDTAVYYCARISVYFDLWGYYHYYGLDYWGQGTLVTVSS |
| 134 | CXCR5-1-101 | EVQLVQSGAEVKKPGSSVKVSCKASGGTFSSYWMNWVRQAPG |
| | | QGLEWIGTIRPNDGETKYNDKFKGRVTITRDTSTSTVYMELSSLR |
| | | SEDTAVYYCARLTFRFTNGYGGFDYWGQGTLVTVSS |
| 135 | CXCR5-1-102 | EVQLVESGGGLVQPGGSLRLSCAASGFTFSNYAMGWVRQAPGK |
| | | GLEWVSYISPSGSIKYYPDSVKGRFTISRDNSKNTLYLQMNSLRA |
| | | EDTAVYYCARGRGYYYIGTGHRGHKHRPMDVWGQGTLVTVSS |
| 136 | CXCR5-1-103 | EVQLVESGGGLVQPGGSLRLSCAASGFTFSDYWMHWVRQAPGK |
| | | GLEWVSVISPNGGITYYPDSVKGRFTISRDNSKNTLYLQMNSLRA |
| | | EDTAVYYCARDTDSRLPYHRQPFDYWGQGTLVTVSS |
| 137 | CXCR5-1-104 | EVQLVQSGAEVKKPGSSVKVSCKASGGTFSNYYMHWVRQAPG |
| | | QGLEWIGTIRPNNGYTKYNDKFKGRVTITRDTSTSTVYMELSSLR |
| | | SEDTAVYYCARLYYSSYNLAAMDYWGQGTLVTVSS |
| 138 | CXCR5-1-105 | EVQLVQSGAEVKKPGSSVKVSCKASGGTFSSYWMSWVRQAPG |
| | | QGLEWIGTINPGDGYTKYNDKFKGRVTITRDTSTSTVYMELSSLR |
| | | SEDTAVYYCARFYYYFDKLVYWGQGTLVTVSS |
| 139 | CXCR5-1-106 | EVQLVESGGGLVQPGGSLRLSCAASGFTFSSYGMHWVRQAPGK |
| | | GLEWVAYITYYPDSVKGRFTISRDNSKNTLYLQMNSLRAEDTAV |
| | | YYCARGDDGNFPFDYWGQGTLVTVSS |
| 140 | CXCR5-1-107 | EVQLVQSGAEVKKPGSSVKVSCKASGGTFSSYAMNWVRQAPGQ |
| | | GLEWIGRIRPNNGYNDKFKGRVTITRDTSTSTVYMELSSLRSEDT |
| | | AVYYCARPGEYMDYEITYAPFQFAYWGQGTLVTVSS |
| 141 | CXCR5-1-108 | EVQLVQSGAEVKKPGSSVKVSCKASGGTFSDYAMHWVRQAPG |
| | | QGLEWIGRIRPGDGYTHYADKFKGRVTITRDTSTSTVYMELSSLR |
| | | SEDTAVYYCARFGHSGRSFAYWGQGTLVTVSS |
| 142 | CXCR5-1-109 | EVQLVQSGAEVKKPGSSVKVSCKASGGTFSNYWMNWVRQAPG |
| | | QGLEWIGRINPGNGETHYADKFKGRVTITRDTSTSTVYMELSSLR |
| | | SEDTAVYYCARDPIDSYYFAYGFDYWGQGTLVTVSS |
| 143 | CXCR5-1-110 | EVQLVQSGAEVKKPGSSVKVSCKASGGTFSDYAMNWVRQAPG |
| | | QGLEWIGRINPNDGETYYNQKFKGRVTITRDTSTSTVYMELSSLR |
| | | SEDTAVYYCARHGAPMSVSYTSHPFQMDYWGQGTLVTVSS |
| 144 | CXCR5-1-111 | EVQLVQSGAEVKKPGSSVKVSCKASGGTFSDYAMSWVRQAPGQ |
| | | GLEWIGRIRPGNGYTHYNDKFKGRVTITRDTSTSTVYMELSSLRS |
| | | EDTAVYYCARFYYYGAWLDYWGQGTLVTVSS |
| 145 | CXCR5-1-112 | EVQLVESGGGLVQPGGSLRLSCAASGFTFSSYYMSLVRQAPGKG |
| | | LEWVSVISYDGSEKYYADSVKGRFTISRDNSKNTLYLQMNSLRA |
| | | EDTAVYYCARPSHYYDLWTQYYAYGLDYWGQGTLVTVSS |
| 146 | CXCR5-1-113 | EVQLVQSGAEVKKPGSSVKVSCKASGGTFSNYAMNWVRQAPG |
| | | QGLEWIGRIRPNNGETHYNQKFKGRVTITRDTSTSTVYMELSSLR |
| | | SEDTAVYYCARHTISYGYSQTWFDYWGQGTLVTVSS |
| 147 | CXCR5-1-114 | EVQLVQSGAEVKKPGSSVKVSCKASGGTFSNYWMNWVRQAPG |
| | | QGLEWIGVINPYDGYTHYADKFKGRVTITRDTSTSTVYMELSSL |
| | | RSEDTAVYYCARLTGYFDVFAYGFDYWGQGTLVTVSS |
| 148 | CXCR5-1-115 | EVQLVESGGGLVQPGGSLRLSCAASGFTFWVRQAPGKGLEWVS |
| | | YISYDGGSIKYYPDSVKGRFTISRDNSKNTLYLQMNSLRAEDTAV |
| | | YYCARDRGYYYDGTTYNFGKGFPMDVWGQGTLVTVSS |
| 149 | CXCR5-1-116 | EVQLVQSGAEVKKPGSSVKVSCKASGGTFSDYYMSWVRQAPGQ |
| | | GLEWIGTINPYDGYTYYADKFKGRVTITRDTSTSTVYMELSSLRS |
| | | EDTAVYYCARLSFGNDYFQYAFDYWGQGTLVTVSS |
| 150 | CXCR5-1-117 | EVQLVESGGGLVQPGGSLRLSCAASGFTFSSYWMHWVRQAPGK |
| | | GLEWVSYISPDGSNKYYPDSVKGRFTISRDNSKNTLYLQMNSLR |
| | | AEDTAVYYCARKRHYDIFYGQRGARTFDVWGQGTLVTVSS |
| 151 | CXCR5-1-118 | EVQLVESGGGLVQPGGSLRLSCAASGFTFSSYYMHWVRQAPGK |
| | | GLEWVSVISPNGGIKYYADSVKGRFTISRDNSKNTLYLQMNSLR |
| | | AEDTAVYYCARDKSDYGIYWTQGFDYWGQGTLVTVSS |
| 152 | CXCR5-1-119 | EVQLVQSGAEVKKPGSSVKVSCKASGGTFSSYWMSWVRQAPG |
| | | QGLEWIGRIRPNNGYTKYNQKFKGRVTITRDTSTSTVYMELSSLR |
| | | SEDTAVYYCARSFSSNGGYSGAFAYWGQGTLVTVSS |
| 153 | CXCR5-1-120 | EVQLVESGGGLVQPGGSLRLSCAASGFTFSDYWMHWVRQAPGK |
| | | GLEWVSVISYDGGEKYYPDSVKGRFTISRDNSKNTLYLQMNSLR |
| | | AEDTAVYYCARHLDYGYGFDYWGQGTLVTVSS |
| 154 | CXCR5-1-121 | EVQLVESGGGLVQPGGSLRLSCAASGFTFSSYYMGWVRQAPGK |
| | | GLEWVSYISYNGGNTYYPDSVKGRFTISRDNSKNTLYLQMNSLR |
| | | AEDTAVYYCARDRDNYYSSTGQYFHKGRPMDVWGQGTLVTVS |
| | | S |
| 155 | CXCR5-1-122 | EVQLVESGGGLVQPGGSLRLSCAASGFTFSNYAMGLVRQAPGK |
| | | GLEWVSYISYSGSETYYADSVKGRFTISRDNSKNTLYLQMNSLR |
| | | AEDTAVYYCARGTDSYGDFYTFNFDYWGQGTLVTVSS |
| 156 | CXCR5-1-123 | EVQLVESGGGLVQPGGSLRLSCAASGFTFSNYGMHWVRQAPGK |
| | | GLEWVAYISYSGGNKYYADSVKGRFTISRDNSKNTLYLQMNSL |
| | | RAEDTAVYYCARPDVRDILWRYYYYRGMDYWGQGTLVTVSS |
| 157 | CXCR5-1-124 | EVQLVESGGGLVQPGGSLRLSCAASGFTFSNYWMSWVRQAPGK |
| | | GLEWVAYISYDGSNTYYPDSVKGRFTISRDNSKNTLYLQMNSLR |
| | | AEDTAVYYCARDEGHYYDFYTHDGGYYGGMDVWGQGTLVTV |
| | | SS |
| 158 | CXCR5-1-125 | EVQLVESGGGLVQPGGSLRLSCAASGFTFSDYAMHWVRQAPGK |
| | | GLEWVSVISYDGGITYYADSVKGRFTISRDNSKNTLYLQMNSLR |
| | | AEDTAVYYCARGEDYRYSFYGYYYYKYFPMDVWGQGTLVTVS |
| | | S |
| 159 | CXCR5-1-126 | EVQLVESGGGLVQPGGSLRLSCAASGFTFSSYYMSWVRQAPGK |
| | | GLEWVSYADSVKGRFTISRDNSKNTLYLQMNSLRAEDTAVYYC |
| | | ARATSRWGPYYRQGFDYWGQGTLVTVSS |
| 160 | CXCR5-1-127 | EVQLVESGGGLVQPGGSLRLSCAASGFTFSNYYMHWVRQAPGK |
| | | GLEWVSYISPSGGEKYYADSVKGRFTISRDNSKNTLYLQMNSLR |
| | | AEDTAVYYCARPRGLYSVYTNDHARGLDYWGQGTLVTVSS |
| 161 | CXCR5-1-128 | EVQLVESGGGLVQPGGSLRLSCAASGFTFSSYAMSWVRQAPGK |
| | | GLEWVAVISYNGGNTYYPDSVKGRFTISRDNSKNTLYLQMNSLR |
| | | AEDTAVYYCARGDDNNYAFDYWGQGTLVTVSS |
| 162 | CXCR5-1-129 | EVQLVESGGGLVQPGGSLRLSCAASGFTFSNYAMHWVRQAPGK |
| | | GLEWVAYISYSGGNTYYPDSVKGRFTISRDNSKNTLYLQMNSLR |
| | | AEDTAVYYCARDDRNGFPFDYWGQGTLVTVSS |
| 163 | CXCR5-1-130 | EVQLVESGGGLVQPGGSLRLSCAASGFTFSSYAMSWVRQAPGK |
| | | GLEWVAVISPNGGNKYYPDSVKGRFTISRDNSKNTLYLQMNSLR |
| | | AEDTAVYYCARGLHNWYAFDYWGQGTLVTVSS |
| 164 | CXCR5-1-131 | EVQLVESGGGLVQPGGSLRLSCAASGFTFSNYGMHWVRQAPGK |
| | | GLEWVSVISYSGGITYYADSVKGRFTISRDNSKNTLYLQMNSLR |
| | | AEDTAVYYCARIRDNYFPFDYWGQGTLVTVSS |
| 165 | CXCR5-1-132 | EVQLVESGGGLVQPGGSLRLSCAASGFTFSNYWMHWVRQAPGK |
| | | GLEWVAYISYDGSNTYYPDSVKGRFTISRDNSKNTLYLQMNSLR |
| | | AEDTAVYYCARIRHLFGFSTQDHARGFDVWGQGTLVTVSS |
| 166 | CXCR5-1-133 | EVQLVESGGGLVQPGGSLRLSCAASGFTFSDYGMSWVRQAPGK |
| | | GLEWVSVISYNGGNKYYPDSVKGRFTISRDNSKNTLYLQMNSLR |
| | | AEDTAVYYCARDELYRGSGWGYYGYYGYPMDVWGQGTLVTV |
| | | SS |
| 167 | CXCR5-1-134 | EVQLVESGGGLVQPGGSLRLSCAASGFTFSNYWMSWVRQAPGK |
| | | GLEWVSVISPNGGITYYADSVKGRFTISRDNSKNTLYLQMNSLR |
| | | AEDTAVYYCARHDDNNFGFDYWGQGTLVTVSS |
| 168 | CXCR5-1-135 | EVQLVQSGAEVKKPGSSVKVSCKASGGTFSSYWMSWVRQAPG |
| | | QGLEWIGTIRPGNGETYYNQKFKGRVTITRDTSTSTVYMELSSLR |
| | | SEDTAVYYCARGYSYAAYLDYWGQGTLVTVSS |
| 169 | CXCR5-1-136 | EVQLVESGGGLVQPGGSLRLSCAASGFTFSNYGMSWVRQAPGK |
| | | GLEWVAVISPSGGIKYYPDSVKGRFTISRDNSKNTLYLQMNSLR |
| | | AEDTAVYYCARIRHGNYAFDYWGQGTLVTVSS |
| 170 | CXCR5-1-137 | EVQLVESGGGLVQPGGSLRLSCAASGFTFSNYAMSWDRQAPGK |
| | | GLEWVSYISYNGGITYYPDSVKGRFTISRDNSKNTLYLQMNSLR |
| | | AEDTAVYYCARGRRGNDPFDYWGQGTLVTVSS |
| 171 | CXCR5-1-138 | EVQLVQSGAEVKKPGSSVKVSCKASGGTFSSYWMNWVRQAPG |
| | | QGLEWIGVINPNDGYTKYAQKFKGRVTITRDTSTSTVYMELSSL |
| | | RSEDTAVYYCARLFISYDDFNTAFDYWGQGTLVTVSS |
| 172 | CXCR5-1-139 | EVQLVESGGGLVQPGGSLRLSCAASGFTFSDYYMSWVRQAPGK |
| | | GLEWVSVISYDGSNTYYPDSVKGRFTISRDNSKNTLYLQMNSLR |
| | | AEDTAVYYCARGTQRRTDLHTYPFDYWGQGTLVTVSS |
| 173 | CXCR5-1-140 | EVQLVESGGGLVQPGGSLRLSCAASGFTFSSYWMHWVRQAPGK |
| | | GLEWVAYISPSGSETYYPDSVKGRFTISRDNSKNTLYLQMNSLR |
| | | AEDTAVYYCARDPSRWTGWYRYPFDYWGQGTLVTVSS |
| 174 | CXCR5-1-141 | EVQLVESGGGLVQPGGSLRLSCAASGFTFSDYGMGWVRQAPGK |
| | | GLEWVSYISPSGSEKYYPDSVKGRFTISRDNSKNTLYLQMNSLRA |
| | | EDTAVYYCARIDRDYFAFDYWGQGTLVTVSS |
| 175 | CXCR5-1-142 | EVQLVQSGAEVKKPGSSVKVSCKASGGTFSNYWMSWVRQAPG |
| | | QGLEWIGTIRPNDGETKYNDKFKGRVTITRDTSTSTVYMELSSLR |
| | | SEDTAVYYCARSTSYYYNYATWFAYWGQGTLVTVSS |
| 176 | CXCR5-1-143 | EVQLVQSGAEVKKPGSSVKVSCKASGGTFSSYAMSWVRQAPGQ |
| | | GLEWIGVIRPNNGYTHYADKFKGRVTITRDTSTSTVYMELSSLRS |
| | | EDTAVYYCARDYYWYFVYSAIDYWGQGTLVTVSS |
| 177 | CXCR5-1-144 | EVQLVESGGGLVQPGGSLRLSCAASGFTFSSYYMHWVRQAPGK |
| | | GLEWVSVISPDGGETYYPDSVKGRFTISRDNSKNTLYLQMNSLR |
| | | AEDTAVYYCARDRDDRGILWTYNFDYWGQGTLVTVSS |
| 178 | CXCR5-1-145 | EVQLVESGGGLVQPGGSLRLSCAASGFTFSDYWMHWVRQAPGK |
| | | GLEWVAYISYDGGITYYADSVKGRFTISRDNSKNTLYLQMNSLR |
| | | AEDTAVYYCARIFVLFSLTGQNYYRTLDYWGQGTLVTVSS |
| 179 | CXCR5-1-146 | EVQLVESGGGLVQPGGSLRLSCAASGFTFSNYGMHWVRQAPGK |
| | | GLEWVAYISYDGGNKYYPDSVKGRFTISRDNSKNTLYLQMNSL |
| | | RAEDTAVYYCARDDSDWTSLLRFNFDYWGQGTLVTVSS |
| 180 | CXCR5-1-147 | EVQLVESGGGLVQPGGSLRLSCAASGFTFSNYWMDWVRQAPGK |
| | | GLEWVSVISYDGSNTYYPDSVKGRFTISRDNSKNTLYLQMNSLR |
| | | AEDTAVYYCARHDRDGYAFDYWGQGTLVTVSS |
| 181 | CXCR5-1-148 | EVQLVQSGAEVKKPGSSVKVSCKASGGTFSNYAMNWVRQAPG |
| | | QGLEWIGVIRPGNGYTYYNQKFKGRVTITRDTSTSTVYMELSSL |
| | | RSEDTAVYYCARLTSRFYNFQYYFAYWGQGTLVTVSS |
| 182 | CXCR5-1-149 | EVQLVESGGGLVQPGGSLRLSCAASGFTFSDYAMHWVRQAPGK |
| | | GLEWVSYISYSGSNKYYADSVKGRFTISRDNSKNTLYLQMNSLR |
| | | AEDTAVYYCARGELYYYSGSYYDYGYYYGMDVWGQGTLVTV |
| | | SS |
| 183 | CXCR5-1-150 | EVQLVQSGAEVKKPGSSVKVSCKASGGTFSSYYMSWVRQAPGQ |
| | | GLEWIGVIRPNDGETYYAQKFKGRVTITRDTSTSTVYMELSSLRS |
| | | EDTAVYYCARDEYSYTYGYYMDYWGQGTLVTVSS |
| 184 | CXCR5-1-151 | EVQLVESGGGLVQPGGSLRLSCAASGFTFSSYAMGWVRQAPGK |
| | | GLEWVAVISYSGSNKYYADSVKGRFTISRDNSKNTLYLQMNSLR |
| | | AEDTAVYYCARHLHDNFAFDYWGQGTLVTVSS |
| 185 | CXCR5-1-152 | EVQLVESGGGLVQPGGSLRLSCAASGFTFSSYWMSWVRQAPGK |
| | | GLEWVAYISPDGGIKYYPDSVKGRFTISRDNSKNTLYLQMNSLR |
| | | AEDTAVYYCARRVVLFDLTGYDYAYTFDYWGQGTLVTVSS |
| 186 | CXCR5-1-153 | EVQLVESGGGLVQPGGSLRLSCAASGFTFSSYWMGWVRQAPGK |
| | | GLEWVAYISYDGGNTYYADSVKGRFTISRDNSKNTLYLQMNSL |
| | | RAEDTAVYYCARGEDNRYISSGYDYYYHGPMDVWGQGTLVTV |
| | | SS |
| 187 | CXCR5-1-154 | EVQLVQSGAEVKKPGSSVKVSCKASGGTFSNYWMSWVRQAPG |
| | | QGLEWIGTIRPNNGETHYNQKFKGRVTITRDTSTSTVYMELSSLR |
| | | SEDTAVYYCARHSRPYDTSYTYFGFAMDYWGQGTLVTVSS |
| 188 | CXCR5-1-155 | EVQLVQSGAEVKKPGSSVKVSCKASGGTFSNYYMNWVRQAPG |
| | | QGLEWIGRIRLNNGYTKYNQKFKGRVTITRDTSTSTVYMELSSL |
| | | RSEDTAVYYCARLPFGSGYSSTAFDYWGHGTLVTVSS |
| 189 | CXCR5-1-156 | EVQLVQSGAEVKKPGSSVKVSCKASGGTFSSYYMSWVRQAPGQ |
| | | GLEWIGTIRPNDGYTKYNDKFKGRVTITRDTSTSTVYMELSSLRS |
| | | EDTAVYYCARHSEPSDVSITSFPYTFDYWGQGTLVTVSS |
| 190 | CXCR5-1-157 | EVQLVQSGAEVKKPGSSVKVSCKASGGTFSSYAMNWVRQAPGQ |
| | | GLEWIGRINPNDGYTYYAQKFKGRVTITRDTSTSTVYMELSSLRS |
| | | EDTAVYYCARHGSPNTYYYYMDYWGQGTLVTVSS |
| 191 | CXCR5-1-158 | EVQLVQSGAEVKKPGSSVKVSCKASGGTFSNYWMSWVRQAPG |
| | | QGLEWIGTIRPNNGETKYNDKFKGRVTITRDTSTSTVYMELSSLR |
| | | SEDTAVYYCARGYGSGAAFDYWGQGTLVTVSS |
| 192 | CXCR5-1-159 | EVQLVESGGGLVQPGGSLRLSCAASGFTFSDYWMGWVRQAPGK |
| | | GLEWVSVISPSGSETYYPDSVKGRFTISRDNSKNTLYLQMNSLRA |
| | | EDTAVYYCARDEDHYYIFWGHNYHYHRPMDVWGQGTLVTVSS |
| 193 | CXCR5-1-160 | EVQLVQSGAEVKKPGSSVKVSCKASGGTFSNYWMSWVRQAPG |
| | | QGLEWIGVINPGDGYTKYNQKFKGRVTITRDTSTSTVYMELSSL |
| | | RSEDTAVYYCARDYSWHDYLNYMDYWGQGTLVTVSS |
| 194 | CXCR5-1-161 | EVQLVESGGGLVQPGGSLRLSCAASGFTFSNYAMSWVRQAPGK |
| | | GLEWVSVISPNGGNKYYPDSVKGRFTISRDNSKNTLYLQMNSLR |
| | | AEDTAVYYCARDEGHYYSGWTFNHHKYGGMDVWGQGTLVTV |
| | | SS |
| 195 | CXCR5-1-162 | EVQLVESGGGLVQPGGSLRLSCAASGFTFSNYGMSWVRQAPGK |
| | | GLEWVSYISYSGGNTYYPDSVKGRFTISRDNSKNTLYLQMNSLR |
| | | AEDTAVYYCARIDVWDSFWGYDHARGLDVWGQGTLVTVSS |
| 196 | CXCR5-1-163 | EVQLVQSGAEVKKPGSSVKVSCKASGGTFSDYAMNWVRQAPG |
| | | QGLEWIGRIRPGDGETHYNQKFKGRVTITRDTSTSTVYMELSSLR |
| | | SEDTAVYYCARHFGRFTVFQGGFAYWGQGTLVTVSS |
| 197 | CXCR5-1-164 | EVQLVQSGAEVKKPGSSVKVSCKASGGTFSDYAMHWVRQAPG |
| | | QGLEWIGTINPGDGYTKYADKFKGRVTITRDTSTSTVYMELSSLR |
| | | SEDTAVYYCARLYSSNFGYSAMDYWGQGTLVTVSS |
| 198 | CXCR5-1-165 | EVQLVESGGGLVQPGGSLRLSCAASGFTFSSYGMHWVRQAPGK |
| | | GLEWVSVISYNGGEKYYADSVKGRFTISRDNSKNTLYLQMNSLR |
| | | AEDTAVYYCARDEGHRGDSLRFDFHKHFPMDVWGQGTLVTVS |
| | | S |
| 199 | CXCR5-2-1 | EVQLVESGGGLVQPGGSLRLSCAASGSTISDRAMGWFRQAPGKE |
| | | REMVAAIIGDATNYADSVKGRFTISADNSKNTAYLQMNSLKPED |
| | | TAVYYCARALQYCSPTSCYVDDYFYYMDVWGQGTLVTVSS |
| 200 | CXCR5-2-2 | EVQLVESGGGLVQPGGSLRLSCAASGFTFSTYWMGWFRQAPGK |
| | | ERELVAAISGSGSITNYADSVKGRFTISADNSKNTAYLQMNSLKP |
| | | EDTAVYYCARGPEWTPPGDYFYYMDDWGQGTLVTVSS |
| 201 | CXCR5-2-3 | EVQLVESGGGLVQPGGSLRLSCAASGFSLDDYGMGWFRQAPGK |
| | | EREGVAAIGSDGSTSYADSVKGHFTISADNSKNTAYLQMNSLKP |
| | | EDTAVYYCGTWFGDYNFWGQGTLVTVSS |
| 202 | CXCR5-2-4 | EVQLVESGGGLVQPGGSLRLSCAASGRGFSRYAMGWFRQAPGK |
| | | EREFVAAITPINWGGRGTTVYADSVKGRFTISADNSKNTAYLQM |
| | | NSLKPEDTAVYYCASDPPGWGQGTLVTVSS |
| 203 | CXCR5-2-5 | EVQLVESGGGLVQPGGSLRLSCAASGNIAAINVMGWFRQAPGKE |
| | | REFVAAISWSSGSTAYADSVKGRFTISADNSKNTAYLQMNSLKP |
| | | EDTAVYYCVRDRGGLWGQGTLVTVSS |
| 204 | CXCR5-2-6 | EVQLVESGGGLVQPGGSLRLSCAASDLSFSFYTMGWFRQAPGKE |
| | | RELVATINWSGTPVYADSVKGRFTISADNSKNTAYLQMNSLKPE |
| | | DTAVYYCAREDDYYDGTGYYQYYGMDVWGQGTLVTVSS |
| 205 | CXCR5-2-7 | EVQLVESGGGLVQPGGSLRLSCAASGFTVSNYAMGWFRQAPGK |
| | | EREFVAAIRWSGGITWYADSVKGRFTISADNSKNTAYLQMNSLK |
| | | PEDTAVYYCVRDRGGSWGQGTLVTVSS |
| 206 | CXCR5-2-8 | EVQLVESGGGLVQPGGSLRLSCAASGFTLDYYAMGWFRQAPGK |
| | | ERELVAAINWSGDTIYYADSVKGRFTISADNSKNTAYLQMNSLK |
| | | PEDTAVYYCAREGCSSTSCYLDPWGQGTLVTVSS |
| 207 | CXCR5-2-9 | EVQLVESGGGLVQPGGSLRLSCAASGFTFSTYWMGWFRQAPGK |
| | | ERELVAAISGSGSITNYADSVKGRFTISADNSKNTAYLQMNSLKP |
| | | EDTAVYYCVLTLSPYAMDVWGQGTLVTVSS |
| 208 | CXCR5-2-10 | EVQLVESGGGLVQPGGSLRLSCAASGFSFDDDYVMGWFRQAPG |
| | | KEREFVSAIDWNGNSTYYADSVKGRFTISADNSKNTAYLQMNSL |
| | | KPEDTAVYYCARGPEWTPPGDYFYYMDDWGQGTLVTVSS |
| 209 | CXCR5-2-11 | EVQLVESGGGLVQPGGSLRLSCAASGGTFSIYAMGWFRQAPGKE |
| | | REFVAAISTHSITVYADSVKGRFTISADNSKNTAYLQMNSLKPED |
| | | TAVYYCATYLEMSPGEYFDNWGQGTLVTVSS |
| 210 | CXCR5-2-12 | EVQLVESGGGLVQPGGSLRLSCAASGFTFSTYWMGWFRQAPGK |
| | | ERELVAAISGSGSITNYADSVKGRFTISADNSKNTAYLQMNSLKP |
| | | EDTAVYYCASYWRTGDWFDPWGQGTLVTVSS |
| 211 | CXCR5-2-13 | EVQLVESGGGLVQPGGSLRLSCAASGITFRRYIMGWFRQAPGKE |
| | | REFVAAISSSGALTSYADSVKGRFTISADNSKNTAYLQMNSLKPE |
| | | DTAVYYCAKDRTGSGWFRDVWGQGTLVTVSS |
| 212 | CXCR5-2-14 | EVQLVESGGGLVQPGGSLRLSCAASGIPSIRAMGWFRQAPGKER |
| | | ELVAGISRSGETTWYADSVKGRFTISADNSKNTAYLQMNSLKPE |
| | | DTAVYYCVKSGLDDGYYPEDWGQGTLVTVSS |
| 213 | CXCR5-2-15 | EVQLVESGGGLVQPGGSLRLSCAASGSIDSIHVMGWFRQAPGKE |
| | | REFVAAISWTGGSTAYADSVKGRFTISADNSKNTAYLQMNSLKP |
| | | EDTAVYYCASDPPGWGQGTLVTVSS |
| 214 | CXCR5-2-16 | EVQLVESGGGLVQPGGSLRLSCAASGSTISDRAMGWFRQAPGKE |
| | | REMVAAIIGDATNYADSVKGRFTISADNSKNTAYLQMNSLKPED |
| | | TAVYYCTTDMGGWGQGTLVTVSS |
| 215 | CXCR5-2-17 | EVQLVESGGGLVQPGGSLRLSCAASGMTTIGPMGWFRQAPGKE |
| | | REMVAAISWSGGLTYYADSVKGRFTISADNSKNTAYLQMNSLK |
| | | PEDTAVYYCARVYYDSSGYNDYWGQGTLVTVSS |
| 216 | CXCR5-2-18 | EVQLVESGGGLVQPGGSLRLSCAASGSTISDRAMGWFRQAPGKE |
| | | REMVAAIIGDATNYADSVKGRFTISADNSKNTAYLQMNSLKPED |
| | | TAVYYCARGPEWTPPGDYFYYMDDWGQGTLVTVSS |
| 217 | CXCR5-2-19 | EVQLVESGGGLVQPGGSLRLSCAASGSIDSIHVMGWFRQAPGKE |
| | | REFVAAISWTGGSTAYADSVKGRFTISADNSKNTAYLQMNSLKP |
| | | EDTAVYYCVAGMVRGVDFWGQGTLVTVSS |
| 218 | CXCR5-2-20 | EVQLVESGGGLVQPGGSLRLSCAASGRTFSDYAMGWFRQAPGK |
| | | EREFVAVVNWNGDSTYYADSVKGRFTISADNSKNTAYLQMNSL |
| | | KPEDTAVYYCARLFAQYSDYDYVAEWGQGTLVTVSS |
| 219 | CXCR5-2-21 | EVQLVESGGGLVQPGGSLRLSCAASGRTFFSYPMGWFRQAPGKE |
| | | REFVAAIRWSGGSTYYADSVKGRFTISADNSKNTAYLQMNSLKP |
| | | EDTAVYYCASGRPVPRWGQGTLVTVSS |
| 220 | CXCR5-2-22 | EVQLVESGGGLVQPGGSLRLSCAASGNIFRIETMGWFRQAPGKE |
| | | REFVATIHSSGSTYYADSVKGRFTISADNSKNTAYLQMNSLKPED |
| | | TAVYYCARSDYDVVSGLTNDYLYYLDDWGQGTLVTVSS |
| 221 | CXCR5-2-23 | EVQLVESGGGLVQPGGSLRLSCAASGFNFDDYAMGWFRQAPGK |
| | | EREWVSEISSGGNKDYADSVKGRFTISADNSKNTAYLQMNSLKP |
| | | EDTAVYYCARTSYYYSSGSSFSGRLDYLDDWGQGTLVTVSS |
| 222 | CXCR5-2-24 | EVQLVESGGGLVQPGGSLRLSCAASGFPFSEYPMGWFRQAPGKE |
| | | RELVAGIAWGDGITYYADSVKGRFTISADNSKNTAYLQMNSLKP |
| | | EDTAVYYCITIFVGMDVWGQGTLVTVSS |
| 223 | CXCR5-2-25 | EVQLVESGGGLVQPGGSLRLSCAASGFPFDDYAMGWFRQAPGK |
| | | ERELVAAITRSGKTTYYADSVKGRFTISADNSKNTAYLQMNSLK |
| | | PEDTAVYYCARVYYDSSGYNDYWGQGTLVTVSS |
| 224 | CXCR5-2-26 | EVQLVESGGGLVQPGGSLRLSCAASGFPFDDYAMGWFRQAPGK |
| | | EREFVAAISWSAGSTYYADSVKGRFTISADNSKNTAYLQMNSLK |
| | | PEDTAVYYCARVRDFWGGYDIDHWGQGTLVTVSS |
| 225 | CXCR5-2-27 | EVQLVESGGGLVQPGGSLRLSCAASGFNLDDYADMGWFRQAPG |
| | | KEREFVAAVTWSGGLTSYADSVKGRFTISADNSKNTAYLQMNS |
| | | LKPEDTAVYYCVRDRGGSWGQGTLVTVSS |
| 226 | CXCR5-2-28 | EVQLVESGGGLVQPGGSLRLSCAASGFGIDAMGWFRQAPGKER |
| | | EFVAAISWSGDSTYYADSVKGRFTISADNSKNTAYLQMNSLKPE |
| | | DTAVYYCARAGGPYYDLSTGSSGHLDYWGQGTLVTVSS |
| 227 | CXCR5-2-29 | EVQLVESGGGLVQPGGSLRLSCAASGFDFDNFDDYAMGWFRQA |
| | | PGKEREFVAAINRSGDTTYYADSVKGRFTISADNSKNTAYLQMN |
| | | SLKPEDTAVYYCAKAGPNYYDSDTRGDYWGQGTLVTVSS |
| 228 | CXCR5-2-30 | EVQLVESGGGLVQPGGSLRLSCAASGFNFDDYAMGWFRQAPGK |
| | | EREVVASISTDVDSKYYADSVKGRFTISADNSKNTAYLQMNSLK |
| | | PEDTAVYYCARAEGYWYFDLWGQGTLVTVSS |
| 229 | CXCR5-2-31 | EVQLVESGGGLVQPGGSLRLSCAASGFGFGSYDMGWFRQAPGK |
| | | EREGVSCFTSSDGRTFYADSVKGRFTISADNSKNTAYLQMNSLK |
| | | PEDTAVYYCARAPYTSVAGRAYYYYYGMDVWGQGTLVTVSS |
| 230 | CXCR5-2-32 | EVQLVESGGGLVQPGGSLRLSCAASGFDFDNFDDYAMGWFRQA |
| | | PGKEREFVAAINRSGDTTYYADSVKGRFTISADNSKNTAYLQMN |
| | | SLKPEDTAVYYCGTWFGDYNFWGQGTLVTVSS |
| 231 | CXCR5-2-33 | EVQLVESGGGLVQPGGSLRLSCAASGFPFSIWPMGWFRQAPGKE |
| | | REFVAAIRWSGASTVYADSVKGRFTISADNSKNTAYLQMNSLKP |
| | | EDTAVYYCARLDILGGPDTVGAFDLWGQGTLVTVSS |
| 232 | CXCR5-2-34 | EVQLVESGGGLVQPGGSLRLSCAASGFPFSEYPMGWFRQAPGKE |
| | | RELVAGIAWGDGITYYADSVKGRFTISADNSKNTAYLQMNSLKP |
| | | EDTAVYYCTTDMGGWGQGTLVTVSS |
| 233 | CXCR5-2-35 | EVQLVESGGGLVQPGGSLRLSCAASGFSFDDYAMGWFRQAPGK |
| | | ERELVAAVRWSGGITWYADSVKGRFTISADNSKNTAYLQMNSL |
| | | KPEDTAVYYCVRVARDRGYNYDSDWGQGTLVTVSS |
| 234 | CXCR5-2-36 | EVQLVESGGGLVQPGGSLRLSCAASGFPLDDYAMGWFRQAPGK |
| | | ERELVAGIAWGDGSTYYADSVKGRFTISADNSKNTAYLQMNSL |
| | | KPEDTAVYYCARTFKTGYRSGYYWGQGTLVTVSS |
| 235 | CXCR5-2-37 | EVQLVESGGGLVQPGGSLRLSCAASGFPLDDYAMGWFRQAPGK |
| | | ERELVAGISSEGTTYYADSVKGRFTISADNSKNTAYLQMNSLKPE |
| | | DTAVYYCVTDQSAYGQTVFFDSWGQGTLVTVSS |
| 236 | CXCR5-2-38 | EVQLVESGGGLVQPGGSLRLSCAASGFPLDYYGMGWFRQAPGK |
| | | ERELVAAISRSGGSTYYADSVKGRFTISADNSKNTAYLQMNSLK |
| | | PEDTAVYYCARDPDDYGDYTFDYWGQGTLVTVSS |
| 237 | CXCR5-2-39 | EVQLVESGGGLVQPGGSLRLSCAASGFSFDDDYVMGWFRQAPG |
| | | KEREFVAAISRSGGDTFYADSVKGRFTISADNSKNTAYLQMNSL |
| | | KPEDTAVYYCVAGMVRGVDFWGQGTLVTVSS |
| 238 | CXCR5-2-40 | EVQLVESGGGLVQPGGSLRLSCAASGFSFDDDYVMGWFRQAPG |
| | | KEREFVSAIDWNGNSTYYADSVKGRFTISADNSKNTAYLQMNSL |
| | | KPEDTAVYYCAGWIHMKGGFLDYWGQGTLVTVSS |
| 239 | CXCR5-2-41 | EVQLVESGGGLVQPGGSLRLSCAASGFSFDDDYVMGWFRQAPG |
| | | KEREFVSAIDWNGNSTYYADSVKGRFTISADNSKNTAYLQMNSL |
| | | KPEDTAVYYCARADCSGGVCNAYWGQGTLVTVSS |
| 240 | CXCR5-2-42 | EVQLVESGGGLVQPGGSLRLSCAASGFAFSRYGMGWFRQAPGK |
| | | ERELVAGITPGGNTNYADSVKGRFTISADNSKNTAYLQMNSLKP |
| | | EDTAVYYCAMTSWGLVYWGQGTLVTVSS |
| 241 | CXCR5-2-43 | EVQLVESGGGLVQPGGSLRLSCAASGFSFDDYAMGWFRQAPGK |
| | | ERELVSDISFGGNTNYADSVKGRFTISADNSKNTAYLQMNSLKPE |
| | | DTAVYYCARTSYYYSSGSSFSGRLDYLDDWGQGTLVTVSS |
| 242 | CXCR5-2-44 | EVQLVESGGGLVQPGGSLRLSCAASGFSLDDYGMGWFRQAPGK |
| | | EREGVAAIGSDGSTSYADSVKGHFTISADNSKNTAYLQMNSLKP |
| | | EDTAVYYCARALQYCSPTSCYVDDYFYYMDVWGQGTLVTVSS |
| 243 | CXCR5-2-45 | EVQLVESGGGLVQPGGSLRLSCAASGFSLDDYGMGWFRQAPGK |
| | | EREGVAAIGSDGSTSYADSVKGRFTISADNSKNTAYLQMNSLKP |
| | | EDTAVYYCARGFSSGWYGWDSWGQGTLVTVSS |
| 244 | CXCR5-2-46 | EVQLVESGGGLVQPGGSLRLSCAASGFSLDDYGMGWFRQAPGK |
| | | ERELVAAISRSGNVTAYADSVKGHFTISADNSKNTAYLQMNSLK |
| | | PEDTAVYYCGTWFGDYNFWGQGTLVTVSS |
| 245 | CXCR5-2-47 | EVQLVESGGGLVQPGGSLRLSCAASGFSLDDYGMGWFRQAPGK |
| | | EREFVAGVAWSSDFTAYADSVKGRFTISADNSKNTAYLQMNSL |
| | | KPEDTAVYYCARASPGRYCSGRSCYFDWYFHLWGQGTLVTVSS |
| 246 | CXCR5-2-48 | EVQLVESGGGLVQPGGSLRLSCAASGFSLDYYAMGWFRQAPGK |
| | | EREFVASISWIIGSTYYADSVKGRFTISADNSKNTAYLQMNSLKP |
| | | EDTAVYYCARALQYCSPTSCYVDDYFYYMDVWGQGTLVTVSS |
| 247 | CXCR5-2-49 | EVQLVESGGGLVQPGGSLRLSCAASGFSLDYYAMGWFRQAPGK |
| | | EREFVASISWIIGSTYYADSVKGRFTISADNSKNTAYLQMNSLKP |
| | | EDTAVYYCARVNPSDYYDSRGYPDYWGQGTLVTVSS |
| 248 | CXCR5-2-50 | EVQLVESGGGLVQPGGSLRLSCAASGFAFSTASMGWFRQAPGKE |
| | | REFVAAITRGSTYYADSVKGRFTISADNSKNTAYLQMNSLKPED |
| | | TAVYYCVLTLSPYAMDVWGQGTLVTVSS |
| 249 | CXCR5-2-51 | EVQLVESGGGLVQPGGSLRLSCAASGDTFNWYAMGWFRQAPG |
| | | KERELVATITADGITNYADSVKGRFTISADNSKNTAYLQMNSLKP |
| | | EDTAVYYCARDREAYSYGYNDYWGQGTLVTVSS |
| 250 | CXCR5-2-52 | EVQLVESGGGLVQPGGSLRLSCAASGFAFDDYAMGWFRQAPGK |
| | | EREIVAAIRWSGGITWYADSVKGRFTISADNSKNTAYLQMNSLK |
| | | PEDTAVYYCATEETLQQLLRAYCWGQGTLVTVSS |
| 251 | CXCR5-2-53 | EVQLVESGGGLVQPGGSLRLSCAASGFTDDYYAMGWFRQAPGK |
| | | EREFVAAISWSGGSTYYADSVKGRFTISADNSKNTAYLQMNSLK |
| | | PEDTAVYYCARGPYGGASYFTVWGQGTLVTVSS |
| 252 | CXCR5-2-54 | EVQLVESGGGLVQPGGSLRLSCAASGFTFENYAMGWFRQAPGK |
| | | EREFVAAINWNGASTDYADSVKGRFTISADNSKNTAYLQMNSL |
| | | KPEDTAVYYCARDHPNYYYGMDVWGQGTLVTVSS |
| 253 | CXCR5-2-55 | EVQLVESGGGLVQPGGSLRLSCAASGFTFSTHWMGWFRQAPGK |
| | | ERELLAEIYPSGSYYADSVKGRFTISADNSKNTAYLQMNSLKPED |
| | | TAVYYCAREGPRVDLNYDFWSPDYYYYMDVWGQGTLVTVSS |
| 254 | CXCR5-2-56 | EVQLVESGGGLVQPGGSLRLSCAASDLSFSFYTMGWFRQAPGKE |
| | | RELVAAVTSGGITNYADSVKGRFTISADNSKNTAYLQMNSLKPE |
| | | DTAVYYCAREDDYYDGTGYYQYYGMDVWGQGTLVTVSS |
| 255 | CXCR5-2-57 | EVQLVESGGGLVQPGGSLRLSCAASGRGFSRYAMGWFRQAPGK |
| | | EREFVAAITPINWGGRGTTVYADSVKGRFTISADNSKNTAYLQM |
| | | NSLKPEDTAVYYCAREDDYYDGTGYYQYYGMDVWGQGTLVT |
| | | VSS |
| 256 | CXCR5-2-58 | EVQLVESGGGLVQPGGSLRLSCAASGSTFSKAVMGWFRQAPGK |
| | | EREFVAAISSSGISTIYADSVKGRFTISADNSKNTAYLQMNSLKPE |
| | | DTAVYYCARGGGPHYYYYYYMDVWGQGTLVTVSS |
| 257 | CXCR5-2-59 | EVQLVESGGGLVQPGGSLRLSCAASGSTFSSYRMGWFRQAPGKE |
| | | REFVSAINYSGGSTYYADSVKGRFTISADNSKNTAYLQMNSLKP |
| | | EDTAVYYCAREGEYSSSWYYYYYGMDVWGQGTLVTVSS |
| 258 | CXCR5-2-60 | EVQLVESGGGLVQPGGSLRLSCAASGYFASWYYMGWFRQAPG |
| | | KERELVAGVSRGGMTSLGDSTLYADSVKGRFTISADNSKNTAYL |
| | | QMNSLKPEDTAVYYCARDRPDYYYYYGMDVWGQGTLVTVSS |
| 259 | CXCR5-2-61 | EVQLVESGGGLVQPGGSLRLSCAASGCTVSINAMGWFRQAPGK |
| | | EREFVAAISWSGGSTYYADSVKGRFTISADNSKNTAYLQMNSLK |
| | | PEDTAVYYCARLFAQYSDYDYVAEWGQGTLVTVSS |
| 260 | CXCR5-2-62 | EVQLVESGGGLVQPGGSLRLSCAASGDIFSNYGMGWFRQAPGK |
| | | EREGVAAIGSDGSTSYADSVKGRFTISADNSKNTAYLQMNSLKP |
| | | EDTAVYYCATAVGATSDDPFDMWGQGTLVTVSS |
| 261 | CXCR5-2-63 | EVQLVESGGGLVQPGGSLRLSCAASGDIGSINAMGWFRQAPGKE |
| | | RELVAAIRWSGGITWYADSVKGRFTISADNSKNTAYLQMNSLKP |
| | | EDTAVYYCVKSGGNYGDYVVWGQGTLVTVSS |
| 262 | CXCR5-2-64 | EVQLVESGGGLVQPGGSLRLSCAASGDIGSINAMGWFRQAPGKE |
| | | REFVAAITPINWGGRGTTVYADSVKGRFTISADNSKNTAYLQMN |
| | | SLKPEDTAVYYCVMRGSGVATRVYWGQGTLVTVSS |
| 263 | CXCR5-2-65 | EVQLVESGGGLVQPGGSLRLSCAASGDIGSINAMGWFRQAPGKE |
| | | REFVAAVRWSGGITWYADSVKGRFTISADNSKNTAYLQMNSLK |
| | | PEDTAVYYCARTRHDYSNVYWGQGTLVTVSS |
| 264 | CXCR5-2-66 | EVQLVESGGGLVQPGGSLRLSCAASGDIGSINAMGWFRQAPGKE |
| | | RELVAGISRSGGTTYYADSVKGRFTISADNSKNTAYLQMNSLKP |
| | | EDTAVYYCLAVTSGADAFDIWGQGTLVTVSS |
| 265 | CXCR5-2-67 | EVQLVESGGGLVQPGGSLRLSCAASGDISSIVAMGWFRQAPGKE |
| | | RELVAAIRWSEDRVWYADSVKGRFTISADNSKNTAYLQMNSLK |
| | | PEDTAVYYCARDQGREDDFWSGYDEPRDVWGQGTLVTVSS |
| 266 | CXCR5-2-68 | EVQLVESGGGLVQPGGSLRLSCAASGDISSIVAMGWFRQAPGKE |
| | | RELVAAIRWSEDRVWYADSVKGRFTISADNSKNTAYLQMNSLK |
| | | PEDTAVYYCARTFKTGYRSGYYWGQGTLVTVSS |
| 267 | CXCR5-2-69 | EVQLVESGGGLVQPGGSLRLSCAASGDTFNWYAMGWFRQAPG |
| | | KEREIVAAIDWSGSSTYYADSVKGRFTISADNSKNTAYLQMNSL |
| | | KPEDTAVYYCANLEFNYYDSRQLRWGQGTLVTVSS |
| 268 | CXCR5-2-70 | EVQLVESGGGLVQPGGSLRLSCAASGDTFNWYAMGWFRQAPG |
| | | KEREIVAAISRSGDTTYYADSVKGRFTISADNSKNTAYLQMNSLK |
| | | PEDTAVYYCARASSDYGDVSGPWGQGTLVTVSS |
| 269 | CXCR5-2-71 | EVQLVESGGGLVQPGGSLRLSCAASGDTFNWYAMGWFRQAPG |
| | | KEREIVAAISRSGDTTYYADSVKGRFTISADNSKNTAYLQMNSLK |
| | | PEDTAVYYCARTGSSSPDSYMDVWGQGTLVTVSS |
| 270 | CXCR5-2-72 | EVQLVESGGGLVQPGGSLRLSCAASGDTFNWYAMGWFRQAPG |
| | | KEREFVAAISRSGSITYYADSVKGRFTISADNSKNTAYLQMNSLK |
| | | PEDTAVYYCVSDVGNNWYADSWGQGTLVTVSS |
| 271 | CXCR5-2-73 | EVQLVESGGGLVQPGGSLRLSCAASGDTFNWYAMGWFRQAPG |
| | | KEREFVAAISWSEDNTYYADSVKGRFTISADNSKNTAYLQMNSL |
| | | KPEDTAVYYCVKAAQDYGDSTFDFWGQGTLVTVSS |
| 272 | CXCR5-2-74 | EVQLVESGGGLVQPGGSLRLSCAASGDTFNWYAMGWFRQAPG |
| | | KERELVASITNGGSTSYADSVKGRFTISADNSKNTAYLQMNSLKP |
| | | EDTAVYYCVGCSGGSCNYWGQGTLVTVSS |
| 273 | CXCR5-2-75 | EVQLVESGGGLVQPGGSLRLSCAASGDTFSSYSMGWFRQAPGKE |
| | | REFVAAVTWSGGITWYADSVKGRFTISADNSKNTAYLQMNSLK |
| | | PEDTAVYYCARDLYYDSSGYYGGWGQGTLVTVSS |
| 274 | CXCR5-2-76 | EVQLVESGGGLVQPGGSLRLSCAASGDTFSWYAMGWFRQAPGK |
| | | EREFVAAISNSGLSTYYADSVKGRFTISADNSKNTAYLQMNSLKP |
| | | EDTAVYYCARAYCSGGSCYDYWGQGTLVTVSS |
| 275 | CXCR5-2-77 | EVQLVESGGGLVQPGGSLRLSCAASGDTFSWYAMGWFRQAPGK |
| | | EREFQAAISRSGGTTYYADSVKGRFTISADNSKNTAYLQMNSLK |
| | | PEDTAVYYCARVMESGYDYLDYWGQGTLVTVSS |
| 276 | CXCR5-2-78 | EVQLVESGGGLVQPGGSLRLSCAASGDTFSWYAMGWFRQAPGK |
| | | EREFVAAISSSGEVTTYADSVKGRFTISADNSKNTAYLQMNSLKP |
| | | EDTAVYYCARIVLVAVGELTDYWGQGTLVTVSS |
| 277 | CXCR5-2-79 | EVQLVESGGGLVQPGGSLRLSCAASGERAFSNYAMGWFRQAPG |
| | | KERELVAAVTSGGTTYYADSVKGRFTISADNSKNTAYLQMNSL |
| | | KPEDTAVYYCARGPEWTPPGDYFYYMDDWGQGTLVTVSS |
| 278 | CXCR5-2-80 | EVQLVESGGGLVQPGGSLRLSCAASGFSLDYYGMGWFRQAPGK |
| | | EREFVAAIDWSGGTTYYADSVKGRFTISADNSKNTAYLQMNSLK |
| | | PEDTAVYYCARGPEWTPPGDYFYYMDDWGQGTLVTVSS |
| 279 | CXCR5-2-81 | EVQLVESGGGLVQPGGSLRLSCAASGFTFSTYWMGWFRQAPGK |
| | | ERELVAAISGSGSITNYADSVKGRFTISADNSKNTAYLQMNSLKP |
| | | EDTAVYYCARDWQSLVRGVSIDQWGQGTLVTVSS |
| 280 | CXCR5-2-82 | EVQLVESGGGLVQPGGSLRLSCAASGFTDDYYAMGWFRQAPGK |
| | | ERELVAGIDTSGIVNYADSVKGRFTISADNSKNTAYLQMNSLKPE |
| | | DTAVYYCARGQLRYFDWLLDYYFDYWGQGTLVTVSS |
| 281 | CXCR5-2-83 | EVQLVESGGGLVQPGGSLRLSCAASGFTFSSYPMGWFRQAPGKE |
| | | REFVAAISSSGVTTIYADSVKGRFTISADNSKNTAYLQMNSLKPE |
| | | DTAVYYCASDPPGWGQGTLVTVSS |
| 282 | CXCR5-2-84 | EVQLVESGGGLVQPGGSLRLSCAASGFTFSTSWMGWFRQAPGK |
| | | ERELVALISMSGDDSAYADSVKGRFTISADNSKNTAYLQMNSLK |
| | | PEDTAVYYCARGNYYMDVWGQGTLVTVSS |
| 283 | CXCR5-2-85 | EVQLVESGGGLVQPGGSLRLSCAASGFTFSTYWMGWFRQAPGK |
| | | ERELVAAINWDSARTYYADSVKGRFTISADNSKNTAYLQMNSL |
| | | KPEDTAVYYCTTDQHWGQGTLVTVSS |
| 284 | CXCR5-2-86 | EVQLVESGGGLVQPGGSLRLSCAASGFTFSTYWMGWFRQAPGK |
| | | ERELVAAISGGGSITNYADSVKGRFTISADNSKNTAYLQMNSLKP |
| | | EDTAVYYCARGPEWTPPGDYFYYMDDWGQGTLVTVSS |
| 285 | CXCR5-2-87 | EVQLVESGGGLVQPGGSLRLSCAASGFTFSTYWMGWFRQAPGK |
| | | EREMVAAISGSGATNYADSVKGRFTISADNSKNTAYLQMNSLKP |
| | | EDTAVYYCARGPEWTPPGDYFYYMDVWGQGTLVTVSS |
| 286 | CXCR5-2-88 | EVQLVESGGGLVQPGGSLRLSCAASGFTFSTYWMGWFRQAPGK |
| | | ERELVAAISGSGSITNYADSVKGRFTISADNSKNTAYLQMNSLKP |
| | | EDTAVYYCAGGSYGGYVWGQGTLVTVSS |
| 287 | CXCR5-2-89 | QVQLVESGGGLVQPGGSLRLSCAASGFTFSTYWMGWFRQAPGK |
| | | ERELVAAISGSGSITNYADSVKGRFTISADNSKNTAYLQMNSLKP |
| | | EDTAVYYCAHQYCAAGSCYDKWGQGTLVTVSS |
| 288 | CXCR5-2-90 | EVQLVESGGGLVQPGGSLRLSCAASGFTFSTYWMGWFRQAPGK |
| | | ERELVAAISGSGSITNYADSVKGRFTISADNSKNTAYLQMNSLKP |
| | | EDTAVYYCAKAERGSERAYWGQGTLVTVSS |
| 289 | CXCR5-2-91 | EVQLVESGGGLVQPGGSLRLSCAASGFTFSTYWMGWFRQAPGK |
| | | ERELVAAISGSGSITNYADSVKGRFTISADNSKNTAYLQMNSLKP |
| | | EDTAVYYCAKAGPNYYDSDTRGDYWGQGTLVTVSS |
| 290 | CXCR5-2-92 | EVQLVESGGGLVQPGGSLRLSCAASGFTFSTYWMGWFRQAPGK |
| | | ERELVAAISGSGSITNYADSVKGRFTISADNSKNTAYLQMNSLKP |
| | | EDTAVYYCARDGDFWSGYRDYWGQGTLVTVSS |
| 291 | CXCR5-2-93 | EVQLVESGGGLVQPGGSLRLSCAASGSIYSLDAMGWFRQAPGKE |
| | | REFVAAISRSGSITYYADSVKGRFTISADNSKNTAYLQMNSLKPE |
| | | DTAVYYCTTDHYVWGTFDPWGQGTLVTVSS |
| 292 | CXCR5-2-94 | EVQLVESGGGLVQPGGSLRLSCAASGFTFSTYWMGWFRQAPGK |
| | | ERELVAAISGSGSITNYADSVKGRFTISADNSKNTAYLQMNSLKP |
| | | EDTAVYYCARGPYGGASYFTVWGQGTLVTVSS |
| 293 | CXCR5-2-95 | EVQLVESGGGLVQPGGSLRLSCAASGFTFSTYWMGWFRQAPGK |
| | | ERELVAAISGSGSITNYADSVKGRFTISADNSKNTAYLQMNSLKP |
| | | EDTAVYYCARGVGYCGGMGCHEGDYWGQGTLVTVSS |
| 294 | CXCR5-2-96 | EVQLVESGGGLVQPGGSLRLSCAASGFTFSTYWMGWFRQAPGK |
| | | ERELVAAISGSGSITNYADSVKGRFTISADNSKNTAYLQMNSLKP |
| | | EDTAVYYCARPYCSSTSCYSSWGQGTLVTVSS |
| 295 | CXCR5-2-97 | EVQLVESGGGLVQPGGSLRLSCAASGFTFSTYWMGWFRQAPGK |
| | | ERELVAAISGSGSITNYADSVKGRFTISADNSKNTAYLQMNSLKP |
| | | EDTAVYYCARQMCGGGDCYIHWGQGTLVTVSS |
| 296 | CXCR5-2-98 | EVQLVESGGGLVQPGGSLRLSCAASGFTFSTYWMGWFRQAPGK |
| | | ERELVAAISGSGSITNYADSVKGRFTISADNSKNTAYLQMNSLKP |
| | | EDTAVYYCARVYYDSSGYYDYWGQGTLVTVSS |
| 297 | CXCR5-2-99 | EVQLVESGGGLVQPGGSLRLSCAASGFTFSTYWMGWFRQAPGK |
| | | ERELVAAISGSGSITNYADSVKGRFTISADNSKNTAYLQMNSLKP |
| | | EDTAVYYCASLWAGYDGDYFNYWGQGTLVTVSS |
| 298 | CXCR5-2-100 | EVQLVESGGGLVQPGGSLRLSCAASGFTFSTYWMGWFRQAPGK |
| | | ERELVAAISGSGSITNYADSVKGRFTISADNSKNTAYLQMNSLKP |
| | | EDTAVYYCATSKLVGSTYVDYWGQGTLVTVSS |
| 299 | CXCR5-2-101 | EVQLVESGGGLVQPGGSLRLSCAASGFTFSTYWMGWFRQAPGK |
| | | ERELVAAISGSGSITNYADSVKGRFTISADNSKNTAYLQMNSLKP |
| | | EDTAVYYCATWMGTYGDDYWGQGTLVTVSS |
| 300 | CXCR5-2-102 | EVQLVESGGGLVQPGGSLRLSCAASGFTFSTYWMGWFRQAPGK |
| | | EREFVAATSSSGGSTSYADSVKGRFTISADNSKNTAYLQMNSLKP |
| | | EDTAVYYCARAGYEDYWGQGTLVTVSS |
| 301 | CXCR5-2-103 | EVQLVESGGGLVQPGGSLRLSCAASGFTFSTYWMGWFRQAPGK |
| | | EREFVAATSSSGGSTSYADSVKGRFTISADNSKNTAYLQMNSLKP |
| | | EDTAVYYCARGPEWTPPGDYFYYMDDWGQGTLVTVSS |
| 302 | CXCR5-2-104 | EVQLVESGGGLVQPGGSLRLSCAASGFTFSTYWMGWFRQAPGK |
| | | ERELVAHIYSDGSINYADSVKGRFTISADNSKNTAYLQMNSLKPE |
| | | DTAVYYCAKVESEDLLVDSLIYWGQGTLVTVSS |
| 303 | CXCR5-2-105 | EVQLVESGGGLVQPGGSLRLSCAASGFTFSTYWMGWFRQAPGK |
| | | EREFVAVVNWNGDSTYYADSVKGRFTISADNSKNTAYLQMNSL |
| | | KPEDTAVYYCARGPEWTPPGDYFYYMDDWGQGTLVTVSS |
| 304 | CXCR5-2-106 | EVQLVESGGGLVQPGGSLRLSCAASGFTIDDYAMGWFRQAPGK |
| | | ERELVSLINSDGTTSYADSVKGRFTISADNSKNTAYLQMNSLKPE |
| | | DTAVYYCARVVYGSDSFDDFWGQGTLVTVSS |
| 305 | CXCR5-2-107 | EVQLVESGGGLVQPGGSLRLSCAASGFTLDAYAMGWFRQAPGK |
| | | EREFVAAINSGGSTEYADSVKGRFTISADNSKNTAYLQMNSLKPE |
| | | DTAVYYCANAYDFWSGPVYWGQGTLVTVSS |
| 306 | CXCR5-2-108 | EVQLVESGGGLVQPGGSLRLSCAASGFTLDAYAMGWFRQAPGK |
| | | EREFVAAINSGGSTEYADSVKGRFTISADNSKNTAYLQMNSLKPE |
| | | DTAVYYCVRPNLRYTYGYDYWGQGTLVTVSS |
| 307 | CXCR5-2-109 | EVQLVESGGGLVQPGGSLRLSCAASGFTLDAYAMGWFRQAPGK |
| | | EREFVAAISKSDGSTYYADSVKGRFTISADNSKNTAYLQMNSLK |
| | | PEDTAVYYCARVYYDSSGYNDYWGQGTLVTVSS |
| 308 | CXCR5-2-110 | EVQLVESGGGLVQPGGSLRLSCAASGFTLDAYAMGWFRQAPGK |
| | | ERELVAAISRSGNTYYADSVKGRFTISADNSKNTAYLQMNSLKP |
| | | EDTAVYYCARNRLTGDSSQVFWGQGTLVTVSS |
| 309 | CXCR5-2-111 | EVQLVESGGGLVQPGGSLRLSCAASGFTFSSYPMGWFRQAPGKE |
| | | REFVAAISSSGVTTYYADSVKGRFTISADNSKNTAYLQMNSLKPE |
| | | DTAVYYCVTDQSAYGQTVFFDSWGQGTLVTVSS |
| 310 | CXCR5-2-112 | EVQLVESGGGLVQPGGSLRLSCAASGFTFSSYPMGWFRQAPGKE |
| | | REFVAAISSSGVTTIYADSVKGRFTISADNSKNTAYLQMNSLKPE |
| | | DTAVYYCARGPYYYDSSGYYGPNDYWGQGTLVTVSS |
| 311 | CXCR5-2-113 | EVQLVESGGGLVQPGGSLRLSCAASGFTDDYYVMGWFRQAPGK |
| | | EREFVAVISWSGSNTYYADSVKGRFTISADNSKNTAYLQMNSLK |
| | | PEDTAVYYCARALQYCSPTSCYVDDYFYYMDVWGQGTLVTVSS |
| 312 | CXCR5-2-114 | EVQLVESGGGLVQPGGSLRLSCAASGFTDGIDAMGWFRQAPGK |
| | | ERELVAVISWSGGITWYADSVKGRFTISADNSKNTAYLQMNSLK |
| | | PEDTAVYYCVRAGDTRNDYNYGAYWGQGTLVTVSS |
| 313 | CXCR5-2-115 | EVQLVESGGGLVQPGGSLRLSCAASGFTFDDTGMGWFRQAPGK |
| | | EREGVAAIGSDGSTSYADSVKGRFTISADNSKNTAYLQMNSLKP |
| | | EDTAVYYCAKGAQWEQRTYDSWGQGTLVTVSS |
| 314 | CXCR5-2-116 | EVQLVESGGGLVQPGGSLRLSCAASGFTFDDYNMGWFRQAPGK |
| | | EREGVSYISSSDGSTYYADSVKGRFTISADNSKNTAYLQMNSLKP |
| | | EDTAVYYCAAALDGYSGSWGQGTLVTVSS |
| 315 | CXCR5-2-117 | EVQLVESGGGLVQPGGSLRLSCAASGFTFDDYPMGWFRQAPGK |
| | | ERELVAAIRWSDGTTYYADSVKGRFTISADNSKNTAYLQMNSLK |
| | | PEDTAVYYCARLVVPANTYFYYAMDVWGQGTLVTVSS |
| 316 | CXCR5-2-118 | EVQLVESGGGLVQPGGSLRLSCAASGFTFDDYPMGWFRQAPGK |
| | | ERELVAAIRWSDGTTYYADSVKGRFTISADNSKNTAYLQMNSLK |
| | | PEDTAVYYCATDGADTAPIYGMAVWGQGTLVTVSS |
| 317 | CXCR5-2-119 | EVQLVESGGGLVQPGGSLRLSCAASGFTFDDYVMGWFRQAPGK |
| | | EREFVAAISRSPGVTYYADSVKGRFTISADNSKNTAYLQMNSLKP |
| | | EDTAVYYCAREPGPADYRDYWGQGTLVTVSS |
| 318 | CXCR5-2-120 | EVQLVESGGGLVQPGGSLRLSCAASGFTFDDYVMGWFRQAPGK |
| | | EREFVAAISTGGDTTYYADSVKGRFTISADNSKNTAYLQMNSLK |
| | | PEDTAVYYCATDLSGRGDVSEYEYDWGQGTLVTVSS |
| 319 | CXCR5-2-121 | EVQLVESGGGLVQPGGSLRLSCAASGFTFDDYVMGWFRQAPGK |
| | | EREGVSWISSSDKDTYYADSVKGRFTISADNSKNTAYLQMNSLK |
| | | PEDTAVYYCVKVANDYGNYEPSWGQGTLVTVSS |
| 320 | CXCR5-2-122 | EVQLVESGGGLVQPGGSLRLSCAASGFTFDGYAMGWFRQAPGK |
| | | ERELVAAVSWDGRNTYYADSVKGRFTISADNSKNTAYLQMNSL |
| | | KPEDTAVYYCVRAGDTRNDYNYGAYWGQGTLVTVSS |
| 321 | CXCR5-2-123 | EVQLVESGGGLVQPGGSLRLSCAASGFTFDRSWMGWFRQAPGK |
| | | EREWVAGIGSDGTTIYADSVKGRFTISADNSKNTAYLQMNSLKP |
| | | EDTAVYYCARDYYDSSGYYYVWGQGTLVTVSS |
| 322 | CXCR5-2-124 | EVQLVESGGGLVQPGGSLRLSCAASGFTFDRSYHMGWFRQAPG |
| | | KEREFVTAINWSLTRTHYADSVKGRFTISADNSKNTAYLQMNSL |
| | | KPEDTAVYYCATGTFDVLRFLEWRLWGQGTLVTVSS |
| 323 | CXCR5-2-125 | EVQLVESGGGLVQPGGSLRLSCAASGFTFDYYAMGWFRQAPGK |
| | | ERELVAGISWNGGSIYYADSVKGRFTISADNSKNTAYLQMNSLK |
| | | PEDTAVYYCMRYYDSSGYSQDFDYWGQGTLVTVSS |
| 324 | CXCR5-2-126 | EVQLVESGGGLVQPGGSLRLSCAASGFTFEDYAMGWFRQAPGK |
| | | ERELVAAISGSGSITNYADSVKGRFTISADNSKNTAYLQMNSLKP |
| | | EDTAVYYCARGPEWTPPGDYFYYMDDWGQGTLVTVSS |
| 325 | CXCR5-2-127 | EVQLVESGGGLVQPGGSLRLSCAASGFTFEDYAMGWFRQAPGK |
| | | EREFVAAISSSGISTIYADSVKGRFTISADNSKNTAYLQMNSLKPE |
| | | DTAVYYCAREGCSSTSCYLDPWGQGTLVTVSS |
| 326 | CXCR5-2-128 | EVQLVESGGGLVQPGGSLRLSCAASGFTFEDYAMGWFRQAPGK |
| | | EREWVSGISSGGTTVYADSVKGRFTISADNSKNTAYLQMNSLKP |
| | | EDTAVYYCGRTSYYGDFEWGQGTLVTVSS |
| 327 | CXCR5-2-129 | EVQLVESGGGLVQPGGSLRLSCAASGFTFGHYAMGWFRQAPGK |
| | | EREFVAAINRSGDTTYYADSVKGRFTISADNSKNTAYLQMNSLK |
| | | PEDTAVYYCARGPEWTPPGDYFYYMDDWGQGTLVTVSS |
| 328 | CXCR5-2-130 | EVQLVESGGGLVQPGGSLRLSCAASGFTFRRYVMGWFRQAPGK |
| | | EREFVAAIRWSGGITWYADSVKGRFTISADNSKNTAYLQMNSLK |
| | | PEDTAVYYCARGPEWTPPGDYFYYMDDWGQGTLVTVSS |
| 329 | CXCR5-2-131 | EVQLVESGGGLVQPGGSLRLSCAASGFTFRRYVMGWFRQAPGK |
| | | EREFVAAIRWSGGITWYADSVKGRFTISADNSKNTAYLQMNSLK |
| | | PEDTAVYYCVRGRSRGTSGTTADWGQGTLVTVSS |
| 330 | CXCR5-2-132 | EVQLVESGGGLVQPGGSLRLSCAASGFTFRSYPMGWFRQAPGKE |
| | | REFVAAISGSDGSTYYADSVKGRFTISADNSKNTAYLQMNSLKP |
| | | EDTAVYYCARASSDYGDVSGPWGQGTLVTVSS |
| 331 | CXCR5-2-133 | EVQLVESGGGLVQPGGSLRLSCAASGFTFSDYPMGWFRQAPGKE |
| | | REAVAAIASMGGLTYYADSVKGRFTISADNSKNTAYLQMNSLKP |
| | | EDTAVYYCARLFAQYSDYDYVAEWGQGTLVTVSS |
| 332 | CXCR5-2-134 | EVQLVESGGGLVQPGGSLRLSCAASGFTFSDYPMGWFRQAPGKE |
| | | REAVAAIASMGGLTYYADSVKGRFTISADNSKNTAYLQMNSLKP |
| | | EDTAVYYCARSDYDVVSGLTNDYLYYLDDWGQGTLVTVSS |
| 333 | CXCR5-2-135 | EVQLVESGGGLVQPGGSLRLSCAASGFTFSEYGMGWFRQAPGK |
| | | EREFVAGVAWSSDFTAYADSVKGRFTISADNSKNTAYLQMNSL |
| | | KPEDTAVYYCARVGLGSCSTTSCFDYWGQGTLVTVSS |
| 334 | CXCR5-2-136 | EVQLVESGGGLVQPGGSLRLSCAASGFTFSGNWMGWFRQAPGK |
| | | EREGVSCIRWSGGQITYYADSVKGRFTISADNSKNTAYLQMNSL |
| | | KPEDTAVYYCTKGPTGPPRFFDFWGQGTLVTVSS |
| 335 | CXCR5-2-137 | EVQLVESGGGLVQPGGSLRLSCAASGFTFSNYWMGWFRQAPGK |
| | | ERELVATITSGGSTYYADSVKGRFTISADNSKNTAYLQMNSLKPE |
| | | DTAVYYCRAGASYWGQGTLVTVSS |
| 336 | CXCR5-2-138 | EVQLVESGGGLVQPGGSLRLSCAASGFTFSRYAMGWFRQAPGK |
| | | EREFVAAINYSGGSTNYADSVKGRFTISADNSKNTAYLQMNSLK |
| | | PEDTAVYYCAAVGAAGAVFWGQGTLVTVSS |
| 337 | CXCR5-2-139 | EVQLVESGGGLVQPGGSLRLSCAASGFTFSSDAMGWFRQAPGKE |
| | | RELVAAVSGTGTIAYYADSVKGRFTISADNSKNTAYLQMNSLKP |
| | | EDTAVYYCARGSGGGVDYWGQGTLVTVSS |
| 338 | CXCR5-2-140 | EVQLVESGGGLVQPGGSLRLSCAASGFTFSSDDYSMGWFRQAPG |
| | | KERELVAGVNWSGKDTYYADSVKGRFTISADNSKNTAYLQMNS |
| | | LKPEDTAVYYCARANKYYYDYYGVDVWGQGTLVTVSS |
| 339 | CXCR5-2-141 | EVQLVESGGGLVQPGGSLRLSCAASGYTYTTYSMGWFRQAPGQ |
| | | RTRICGGDYWSGKDTYYADSVKGRFTISADNSKNTAYLQMNSL |
| | | KPEDTAVYYCARGPDMIRSWYAWFDPWGQGTLVTVSS |
| 340 | CXCR5-2-142 | QVQLVESGGGLVQPGGSLRLSCAASGNIFINNAMGWFRQAPGKE |
| | | RELVAAINRSGGATSYADSVKGRFTISADNSKNTAYLQMNSLKP |
| | | EDTAVYYCARLFGSPSSSADYYYFDLWGQGTLVTVSS |
| 341 | CXCR5-2-143 | EVQLVESGGGLVQPGGSLRLSCAASGSIFSINAMGWFRQAPGKE |
| | | REFVAAISWSAGSTYYADSVKGRFTISADNSKNTAYLQMNSLKP |
| | | EDTAVYYCAKDRCGGDCNFSVLDWFDPWGQGTLVTVSS |
| 342 | CXCR5-2-144 | EVQLVESGGGLVQPGGSLRLSCAASGFNFDDYAMGWFRQAPGK |
| | | EREWVSEISSGGNKDYADSVKGRFTISADNSKNTAYLQMNSLKP |
| | | EDTAVYYCSAIISSTTGTDYFQNWGQGTLVTVSS |
| 343 | CXCR5-2-145 | EVQLVESGGGLVQPGGSLRLSCAASGRTFSNTLMGWFRQAPGK |
| | | EREAVAAISWSGDNTYYADSVKGRFTISADNSKNTAYLQMNSL |
| | | KPEDTAVYYCAKAGGYDYVWGSYPSDYWGQGTLVTVSS |
| 344 | CXCR5-2-146 | EVQLVESGGGLVQPGGSLRLSCAASGRTGTIYGMGWFRQAPGK |
| | | EREAVAAISWSDGSTYYADSVKGRFTISADNSKNTAYLQMNSLK |
| | | PEDTAVYYCARSDYDVVSGLTNDYLYYLDDWGQGTLVTVSS |
| 345 | CXCR5-2-147 | EVQLVESGGGLVQPGGSLRLSCAASGRTPSIIAMGWFRQAPGKE |
| | | RELVAGISSEGTTIYADSVKGRFTISADNSKNTAYLQMNSLKPED |
| | | TAVYYCVKVGEQTEYVDGTGYDYFYAMDVWGQGTLVTVSS |
| 346 | CXCR5-2-148 | EVQLVESGGGLVQPGGSLRLSCAASGSIDNIHAMGWFRQAPGKE |
| | | RELVAGITWSGDSTYYADSVKGRFTISADNSKNTAYLQMNSLKP |
| | | EDTAVYYCARSPGIRGPINHWGQGTLVTVSS |
| 347 | CXCR5-2-149 | EVQLVESGGGLVQPGGSLRLSCAASGSIDSIHVMGWFRQAPGKE |
| | | REFVAAISWTGGSTAYADSVKGRFTISADNSKNTAYLQMNSLKP |
| | | EDTAVYYCAKDFDYGDYWERDAFDIWGQGTLVTVSS |
| 348 | CXCR5-2-150 | EVQLVESGGGLVQPGGSLRLSCAASGSIDSIHVMGWFRQAPGKE |
| | | REFVAAISWTGGSTAYADSVKGRFTISADNSKNTAYLQMNSLKP |
| | | EDTAVYYCAKGRVGVYGDYLFDHWGQGTLVTVSS |
| 349 | CXCR5-17-3 | QVQLVQSGAEVKKPGSSVKVSCKASGGTFSSHVISWVRQAPGQ |
| | | GLEWMGEIIPLFGTTNYAQKFQGRVTITADESTSTAYMELSSLRS |
| | | EDTAVYYCARANQHFAKGLKGPTSSTVFQGTKGYHYYGMDVW |
| | | GQGTLVTVSS |
| 350 | CXCR5-17-11 | QVQLVQSGAEVKKPGSSVKVSCKASGGSFSSDAISWVRQAPGQG |
| | | LEWMGGIIPFFGTTNYAQKFQGRVTITADESTSTAYMELSSLRSE |
| | | DTAVYYCARDMYYDFSIAGDETFDVIGTRDEVVPADDAFDIWG |
| | | QGTLVTVSS |
| 351 | CXCR5-50-18 | EVQLVESGGGLVQAGGSLRLSCAASGRTFNNDHMGWFRQAPGK |
| | | EREFVAVIEIGGATNYADSVKGRFTISADNAKNTVYLQMNSLKP |
| | | EDTAVYYCASWDGRQVWGQGTQVTVSS |
| 352 | CXCR5-18-27 | EVQLVESGGGLVQPGGSLRLSCAASGLTFDDSAMGWFRQAPGK |
| | | EREFVAAMRWSGASTYYADSVKGRFTISADNSKNTAYLQMNSL |
| | | KPEDTAVYYCAAEDPSMGYYTLEEYEYDWGQGTLVTVSS |
| 353 | CXCR5-18-35 | EVQLVESGGGLVQPGGSLRLSCAASGRTLSKYRMGWFRQAPGK |
| | | EREFVAVIDTNGDNTLYADSVKGRFTISADNSKNTAYLQMNSLK |
| | | PEDTAVYYCAAALDGYSGSWGQGTLVTVSS |
| 354 | CXCR5-18-47 | EVQLVESGGGLVQPGGSLRLSCAASGLPFSRPVMGWFRQAPGKE |
| | | RELVAAIRGSGGSTEYADSVRGLFTITADNSKNTEHLKMNLLKPE |
| | | DTAVYYCASTRFAGRWYPDSKYRWGQGTLVTVST |
| 355 | CXCR5-18-48 | EVQLVESGGGLVQPGGSLRLSCAASGDISSIVAMGWFRQAPGKE |
| | | REFVAVVSGSGDDTYYADSVKGRFTISADNSKNTAYLQMNSLKP |
| | | EDTAVYYCATDEDYALGPNEFDWGQGTLVTVSS |
| 356 | CXCR5-16 | QVQLKESGPGLVAPSESLSITCTVSGFSLIDYGVNWIRQPPGKGLE |
| | | WLGVIWGDGTTYYNPSLKSRLSISKDNSKSQVFLKVTSLTTDDT |
| | | AMYYCARIVYWGQGTLVTVSA |

TABLE 10
CXCR5 Variably Light Chain Sequences

| SEQ | | |
|---|---|---|
| ID | | |
| NO | Variant | Sequence |
| 357 | CXCR5-1-1 | DIVMTQSPLSLPVSLGERASISCRSSQSLVHSDGNTYLEWYQQKP |
| | | GQSPKLLIYKVSNRASGVPDRFSGSGSGTDFTLKISRVEAEDVGV |
| | | YYCQQSSETPLTFGQGTKLEIK |
| 358 | CXCR5-1-2 | DIVMTQSPLSLPVSLGERASISCRSSQSLVHSNGNTYLAWYQQKP |
| | | GQSPKLLIYKASNRASGVPDRFSGSGSGTDFTLKISRVEAEDVGV |
| | | YYCQQSSSYPFTFGQGTKLEIK |
| 359 | CXCR5-1-3 | DIVMTQSPLSLPVSLGERASISCRSSQSLVHSDGNTYLAWYQQKP |
| | | GQSPKLLIYKASNRFSGVPDRFSGSGSGTDFTLKISRVEAEDVGV |
| | | YYCQQGSETPLTFGQGTKLEIK |
| 360 | CXCR5-1-4 | DIVMTQSPLSLPVSLGERASISCRSSQSLVHSNGNTYLAWYQQKP |
| | | GQSPKLLIYKVSNRASGVPDRFSGSGSGTDFTLKISRVEAEDVGV |
| | | YYCQQGYSTPLTFGQGTKLEIK |
| 361 | CXCR5-1-5 | DIVMTQSPLSLPVSLGERASISCRSSQSLVHSDGKTYLEWYQQKP |
| | | GQSPKLLIYKASNRASGVPDRFSGSGSGTDFTLKISRVEAEDVGV |
| | | YYCFQSSSTPFTFGQGTKLEIK |
| 362 | CXCR5-1-6 | DIVMTQSPLSLPVSLGERASISCRSSQSLVNSDGKTYLHWYQQKP |
| | | GQSPKLLIYKASNRASGVPDRFSGSGSGTDFTLKISRVEAEDVGV |
| | | YYCFQGSEYPFTFGQGTKLEIK |
| 363 | CXCR5-1-7 | DIVMTQSPLSLPVSLGERASISCRSSQSLVNSDGNTYLEWYQQKP |
| | | GQSPKLLIYKASNRASGVPDRFSGSGSGTDFTLKISRVEAEDVGV |
| | | YYCFQGSEYPFTFGQGTKLEIK |
| 364 | CXCR5-1-8 | DIVMTQSPLSLPVSLGERASISCRSSQSLVHSNGNTYLHWYQQKP |
| | | GQSPKLLIYKVSNRASGVPDRFSGSGSGTDFTLKISRVEAEDVGV |
| | | YYCFQSYHYPLTFGQGTKLEIK |
| 365 | CXCR5-1-9 | DIVMTQSPLSLPVSLGERASISCRSSQSLVNSDGNTYLHWYQQKP |
| | | GQSPKLLIYKASNRASGVPDRFSGSGSGTDFTLKISRVEAEDVGV |
| | | YYCQQGSSTPLTFGQGTKLEIK |
| 366 | CXCR5-1-10 | DIVMTQSPLSLPVSLGERASISCRSSQSLVNSNGKTYLAWYQQKP |
| | | GQSPKLLIYKASNRFSGVPDRFSGSGSGTDFTLKISRVEAEDVGV |
| | | YYCQQSSHVPFTFGQGTKLEIK |
| 367 | CXCR5-1-11 | DIVMTQSPLSLPVSLGERASISCRSSQSLVNSNGKTYLAWYQQKP |
| | | GQSPKLLIYKASNRFSGVPDRFSGSGSGTDFTLKISRVEAEDVGV |
| | | YYCQQGYHTPLTFGQGTKLEIK |
| 368 | CXCR5-1-12 | DIVMTQSPLSLPVSLGERASISCRSSQSLVNSDGKTYLHWYQQKP |
| | | GQSPKLLIYKVSNRASGVPDRFSGSGSGTDFTLKISRVEAEDVGV |
| | | YYCQQGYETPFTFGQGTKLEIK |
| 369 | CXCR5-1-13 | DIVMTQSPLSLPVSLGERASISCRSSQSLVNSDGKTYLEWYQQKP |
| | | GQSPKLLIYKASNRFSGVPDRFSGSGSGTDFTLKISRVEAEDVGV |
| | | YYCFQSSSVPLTFGQGTKLEIK |
| 370 | CXCR5-1-14 | DIVMTQSPLSLPVSLGERASISCRSSQSLVNSNGKTYLAWYQQKP |
| | | GQSPKLLIYKVSNRASGVPDRFSGSGSGTDFTLKISRVEAEDVGV |
| | | YYCQQSSEYPFTFGQGTKLEIK |
| 371 | CXCR5-1-15 | DIVMTQSPLSLPVSLGERASISCRSSQSLVHSNGKTYLHWYQQKP |
| | | GQSPKLLIYKASNRASGVPDRFSGSGSGTDFTLKISRVEAEDVGV |
| | | YYCFQGYHTPLTFGQGTKLEIK |
| 372 | CXCR5-1-16 | DIVMTQSPLSLPVSLGERASISCRSSQSLVNSNGNTYLHWYQQKP |
| | | GQSPKLLIYKVSNRASGVPDRFSGSGSGTDFTLKISRVEAEDVGV |
| | | YYCFQGSHYPFTFGQGTKLEIK |
| 373 | CXCR5-1-17 | DIVMTQSPLSLPVSLGERASISCRSSQSLVHSDGNTYLHWYQQKP |
| | | GQSPKLLIYKVSNRASGVPDRFSGSGSGTDFTLKISRVEAEDVGV |
| | | YYCQQGYETPFTFGQGTKLEIK |
| 374 | CXCR5-1-18 | DIVMTQSPLSLPVSLGERASISCRSSQSLVHSNGKTYLAWYQQKP |
| | | GQSPKLLIYKASNRASGVPDRFSGSGSGTDFTLKISRVEAEDVGV |
| | | YYCQQSYHVPFTFGQGTKLEIK |
| 375 | CXCR5-1-19 | DIVMTQSPLSLPVSLGERASISCRSSQSLVNSDGNTYLHWYQQKP |
| | | GQSPKLLIYKASNRASGVPDRFSGSGSGTDFTLKISRVEAEDVGV |
| | | YYCQQSSHTPFTFGQGTKLEIK |
| 376 | CXCR5-1-20 | DIVMTQSPLSLPVSLGERASISCRSSQSLVNSDGKTYLEWYQQKP |
| | | GQSPKLLIYKASNRASGVPDRFSGSGSGTDFTLKISRVEAEDVGV |
| | | YYCFQGSHYPFTFGQGTKLEIK |
| 377 | CXCR5-1-21 | DIVMTQSPLSLPVSLGERASISCRSSQSLVNSDGNTYLHWYQQKP |
| | | GQSPKLLIYKVSNRFSGVPDRFSGSGSGTDFTLKISRVEAEDVGV |
| | | YYCFQGYETPLTFGQGTKLEIK |
| 378 | CXCR5-1-22 | DIVMTQSPLSLPVSLGERASISCRSSQSLVNSDGNTYLHWYQQKP |
| | | GQSPKLLIYKASNRASGVPDRFSGSGSGTDFTLKISRVEAEDVGV |
| | | YYCQQSSHVPFTFGQGTKLEIK |
| 379 | CXCR5-1-23 | DIVMTQSPLSLPVSLGERASISCRSSQSLVNSDGNTYLEWYQQKP |
| | | GQSPKLLIYKVSNRFSGVPDRFSGSGSGTDFTLKISRVEAEDVGV |
| | | YYCFQGYHTPFTFGQGTKLEIK |
| 380 | CXCR5-1-24 | DIVMTQSPLSLPVSLGERASISCRSSQSLVNSNGKTYLAWYQQKP |
| | | GQSPKLLIYKVSNRASGVPDRFSGSGSGTDFTLKISRVEAEDVGV |
| | | YYCQQSYHTPFTFGQGTKLEIK |
| 381 | CXCR5-1-25 | DIVMTQSPLSLPVSLGERASISCRSSQSLVNSDGNTYLAWYQQKP |
| | | GQSPKLLIYKASNRASGVPDRFSGSGSGTDFTLKISRVEAEDVGV |
| | | YYCFQGSSTPLTFGQGTKLEIK |
| 382 | CXCR5-1-26 | DIVMTQSPLSLPVSLGERASISCRSSQSLVNSNGNTYLHWYQQKP |
| | | GQSPKLLIYKVSNRFSGVPDRFSGSGSGTDFTLKISRVEAEDVGV |
| | | YYCFQSYSTPFTFGQGTKLEIK |
| 383 | CXCR5-1-27 | YGSMTQSPLSLPVSLGERASISCRSSQSLVHSNGNTYLHWYQQKP |
| | | GQSPKLLIYKASNRFSGVPDRFSGSGSGTDFTLKISRVEAEDVGV |
| | | YYCQQSYSTPLTFGQGTKLEIK |
| 384 | CXCR5-1-28 | DIVMTQSPLSLPVSLGERASISCRSSQSLVNSNGKTYLAWYQQKP |
| | | GQSPKLLIYKASNRASGVPDRFSGSGSGTDFTLKISRVEAEDVGV |
| | | YYCQQSYEVPLTFGQGTKLEIK |
| 385 | CXCR5-1-29 | HIVMTQSPLSLPVSLGERASISCRSSQSLVHSNGKTYLHWYQQKP |
| | | GQSPKLLIYKASNRASGVPDRFSGSGSGTDFTLKISRVEAEDVGV |
| | | YYCQQSSSYPFTFGQGTKLEIK |
| 386 | CXCR5-1-30 | DIVMTQSPLSLPVSLGERASISCRSSQSLVHSDGKTYLEWYQQKP |
| | | GQSPKLLIYKVSNRASGVPDRFSGSGSGTDFTLKISRVEAEDVGV |
| | | YYCFQGSHYPFTFGQGTKLEIK |
| 387 | CXCR5-1-31 | DIVMTQSPLSLPVSLGERASISCRSSQSLVNSDGKTYLHWYQQKP |
| | | GQSPKLLIYKVSNRASGVPDRFSGSGSGTDFTLKISRVEAEDVGV |
| | | YYCQQGYSTPFTFGQGTKLEIK |
| 388 | CXCR5-1-32 | DIVMTQSPLSLPVSLGERASISCRSSQSLVHSDGKTYLAWYQQKP |
| | | GQSPKLLIYKASNRFSGVPDRFSGSGSGTDFTLKISRVEAEDVGV |
| | | YYCQQSYHVPFTFGQGTKLEIK |
| 389 | CXCR5-1-33 | DIVMTQSPLSLPVSLGERASISCRSSQSLVHSDGKTYLEWYQQKP |
| | | GQSPKLLIYKASNRFSGVPDRFSGSGSGTDFTLKISRVEAEDVGV |
| | | YYCQQSSHYPLTFGQGTKLEIK |
| 390 | CXCR5-1-34 | DIVMTQSPLSLPVSLGERASISCRSSQSLVNSNGKTYLAWYQQKP |
| | | GQSPKLLIYKVSNRASGVPDRFSGSGSGTDFTLKISRVEAEDVGV |
| | | YYCQQGSHVPFTFGQGTKLEIK |
| 391 | CXCR5-1-35 | DIVMTQSPLSLPVSLGERASISCRSSQSLVNSDGNTYLHWYQQKP |
| | | GQSPKLLIYKASNRASGVPDRFSGSGSGTDFTLKISRVEAEDVGV |
| | | YYCQQSSSTPFTFGQGTKLEIK |
| 392 | CXCR5-1-36 | DIVMTQSPLSLPVSLGERASISCRSSQSLVNSNGNTYLHWYQQKP |
| | | GQSPKLLIYKASNRASGVPDRFSGSGSGTDFTLKISRVEAEDVGV |
| | | YYCQQGYHYPLTFGQGTKLEIK |
| 393 | CXCR5-1-37 | DIVMTQSPLSLPVSLGERASISCRSSQSLVNSNGKTYLAWYQQKP |
| | | GQSPKLLIYKASNRASGVPDRFSGSGSGTDFTLKISRVEAEDVGV |
| | | YYCQQGSEYPLTFGQGTKLEIK |
| 394 | CXCR5-1-38 | DIVMTQSPLSLPVSLGERASISCRSSQSLVHSNGNTYLEWYQQKP |
| | | GQSPKLLIYKVSNRASGVPDRFSGSGSGTDFTLKISRVEAEDVGV |
| | | YYCQQGSSVPFTFGQGTKLEIK |
| 395 | CXCR5-1-39 | DIVMTQSPLSLPVSLGERASISCRSSQSLVNSNGNTYLAWYQQKP |
| | | GQSPKLLIYKASNRASGVPDRFSGSGSGTDFTLKISRVEAEDVGV |
| | | YYCFQGYEVPFTFGQGTKLEIK |
| 396 | CXCR5-1-40 | DIVMTQSPLSLPVSLGERASISCRSSQSLVNSNGNTYLEWYQQKP |
| | | GQSPKLLIYKVSNRFSGVPDRFSGSGSGTDFTLKISRVEAEDVGV |
| | | YYCQQSSEYPLTFGQGTKLEIK |
| 397 | CXCR5-1-41 | DIVMTQSPLSLPVSLGERASISCRSSQSLVHSNGKTYLEWYQQKP |
| | | GQSPKLLIYKASNRASGVPDRFSGSGSGTDFTLKISRVEAEDVGV |
| | | YYCFQGSHYPLTFGQGTKLEIK |
| 398 | CXCR5-1-42 | YGSMTQSPLSLPVSLGERASISCRSSQSLVHSNGNTYLHWYQQKP |
| | | GQSPKLLIYKVSNRFSGVPDRFSGSGSGTDFTLKISRVEAEDVGV |
| | | YYCQQSSSYPFTFGQGTKLEIK |
| 399 | CXCR5-1-43 | DIVMTQSPLSLPVSLGERASISCRSSQSLVHSNGNTYLHWYQQKP |
| | | GQSPKLLIYKASNRASGVPDRFSGSGSGTDFTLKISRVEAEDVGV |
| | | YYCFQSYEYPFTFGQGTKLEIK |
| 400 | CXCR5-1-44 | DIVMTQSPLSLPVSLGERASISCRSSQSLVHSNGKTYLHWYQQKP |
| | | GQSPKLLIYKASNRASGVPDRFSGSGSGTDFTLKISRVEAEDVGV |
| | | YYCFQSSSTPFTFGQGTKLEIK |
| 401 | CXCR5-1-45 | DIVMTQSPLSLPVSLGERASISCRSSQSLVHSDGKTYLHWYQQKP |
| | | GQSPKLLIYKASNRFSGVPDRFSGSGSGTDFTLKISRVEAEDVGV |
| | | YYCQQSYHYPFTFGQGTKLEIK |
| 402 | CXCR5-1-46 | DIVMTQSPLSLPVSLGERASISCRSSQSLVHSDGNTYLAWYQQKP |
| | | GQSPKLLIYKVSNRASGVPDRFSGSGSGTDFTLKISRVEAEDVGV |
| | | YYCFQGSHYPFTFGQGTKLEIK |
| 403 | CXCR5-1-47 | DIVMTQSPLSLPVSLGERASISCRSSQSLVHSNGNTYLAWYQQKP |
| | | GQSPKLLIYKASNRFSGVPDRFSGSGSGTDFTLKISRVEAEDVGV |
| | | YYCQQSYSYPLTFGQGTKLEIK |
| 404 | CXCR5-1-48 | DIVMTQSPLSLPVSLGERASISCRSSQSLVNSNGNTYLAWYQQKP |
| | | GQSPKLLIYKVSNRASGVPDRFSGSGSGTDFTLKISRVEAEDVGV |
| | | YYCFQSYHTPLTFGQGTKLEIK |
| 405 | CXCR5-1-49 | DIVMTQSPLSLPVSLGERASISCRSSQSLVNSDGNTYLAWYQQKP |
| | | GQSPKLLIYKASNRFSGVPDRFSGSGSGTDFTLKISRVEAEDVGV |
| | | YYCFQSYEVPLTFGQGTKLEIK |
| 406 | CXCR5-1-50 | DIVMTQSPLSLPVSLGERASISCRSSQSLVHSDCKTYLAWYQQKP |
| | | GQSPKLLIYKASNRFSGVPDRFSGSGSGTDFTLKISRVEAEDVGV |
| | | YYCQQGSEYPFTFGQGTKLEIK |
| 407 | CXCR5-1-51 | DIVMTQSPLSLPVSLGERASISCRSSQSLVHSDGNTYLEWYQQKP |
| | | GQSPKLLIYKASNRASGVPDRFSGSGSGTDFTLKISRVEAEDVGV |
| | | YYCQQSSSVPLTFGQGTKLEIK |
| 408 | CXCR5-1-52 | DIVMTQSPLSLPVSLGERASISCRSSQSLVNSDGKTYLAWYQQKP |
| | | GQSPKLLIYKVSNRFSGVPDRFSGSGSGTDFTLKISRVEAEDVGV |
| | | YYCQQGSHVPFTFGQGTKLEIK |
| 409 | CXCR5-1-53 | DIVMTQSPLSLPVSLGERASISCRSSQSLVNSDGKTYLEWYQQKP |
| | | GQSPKLLIYKVSNRASGVPDRFSGSGSGTDFTLKISRVEAEDVGV |
| | | YYCQQSYSVPLTFGQGTKLEIK |
| 410 | CXCR5-1-54 | DIVMTQSPLSLPVSLGERASISCRSSQSLVNSNGKTYLAWYQQKP |
| | | GQSPKLLIYKVSNRFSGVPDRFSGSGSGTDFTLKISRVEAEDVGV |
| | | YYCQQSYSVPLTFGQGTKLEIK |
| 411 | CXCR5-1-55 | DIVMTQSPLSLPVSLGERASISCRSSQSLVNSNGNTYLAWYQQKP |
| | | GQSPKLLIYKVSNRASGVPDRFSGSGSGTDFTLKISRVEAEDVGV |
| | | YYCFQSSHTPFTFGQGTKLEIK |
| 412 | CXCR5-1-56 | DIVMTQSPLSLPVSLGERASISCRSSQSLVNSDGNTYLEWYQQKP |
| | | GQSPKLLIYKASNRASGVPDRFSGSGSGTDFTLKISRVEAEDVGV |
| | | YYCFQGSSTPLTFGQGTKLEIK |
| 413 | CXCR5-1-57 | DIVMTQSPLSLPVSLGERASISCRSSQSLVHSNGKTYLAWYQQKP |
| | | GQSPKLLIYKASNRFSGVPDRFSGSGSGTDFTLKISRVEAEDVGV |
| | | YYCQQSSSYPFTFGQGTKLEIK |
| 414 | CXCR5-1-58 | DIVMTQSPLSLPVSLGERASISCRSSQSLVHSDGNTYLAWYQQKP |
| | | GQSPKLLIYKASNRFSGVPDRFSGSGSGTDFTLKISRVEAEDVGV |
| | | YYCQQSYEYPFTFGQGTKLEIK |
| 415 | CXCR5-1-59 | DIVMTQSPLSLPVSLGERASISCRSSQSLVNSDGKTYLAWYQQKP |
| | | GQSPKLLIYKASNRASGVPDRFSGSGSGTDFTLKISRVEAEDVGV |
| | | YYCFQSSHTPLTFGQGTKLEIK |
| 416 | CXCR5-1-60 | DIVMTQSPLSLPVSLGERASISCRSSQSLVNSDGKTYLHWYQQKP |
| | | GQSPKLLIYKVSNRFSGVPDRFSGSGSGTDFTLKISRVEAEDVGV |
| | | YYCQQSSETPFTFGQGTKLEIK |
| 417 | CXCR5-1-61 | DIVMTQSPLSLPVSLGERASISCRSSQSLVNSNGNTYLAWYQQKP |
| | | GQSPKLLIYKASNRASGVPDRFSGSGSGTDFTLKISRVEAEDVGV |
| | | YYCFQSYSVPLTFGQGTKLEIK |
| 418 | CXCR5-1-62 | DIVMTQSPLSLPVSLGERASISCRSSQSLVNSDGKTYLEWYQQKP |
| | | GQSPKLLIYKASNRFSGVPDRFSGSGSGTDFTLKISRVEAEDVGV |
| | | YYCFQSYETPLTFGQGTKLEIK |
| 419 | CXCR5-1-63 | DIVMTQSPLSLPVSLGERASISCRSSQSLVHSNGNTYLAWYQQKP |
| | | GQSPKLLIYKASNRFSGVPDRFSGSGSGTDFTLKISRVEAEDVGV |
| | | YYCFQSSSTPFTFGQGTKLEIK |
| 420 | CXCR5-1-64 | DIVMTQSPLSLPVSLGERASISCRSSQSLVHSNGNTYLHWYQQKP |
| | | GQSPKLLIYKASNRASGVPDRFSGSGSGTDFTLKISRVEAEDVGV |
| | | YYCQQSYHYPFTFGQGTKLEIK |
| 421 | CXCR5-1-65 | DIVMTQSPLSLPVSLGERASISCRSSQSLVHSDGNTYLAWYQQKP |
| | | GQSPKLLIYKASNRFSGVPDRFSGSGSGTDFTLKISRVEAEDVGV |
| | | YYCQQESSTPFTFGQGTKLEIK |
| 422 | CXCR5-1-66 | DIVMTQSPLSLPVSLGERASISCRSSQSLVHSDGKTYLEWYQQKP |
| | | GQSPKLLIYKASNRFSGVPDRFSGSGSGTDFTLKISRVEAEDVGV |
| | | YYCQQSYHYPLTFGQGTKLEIK |
| 423 | CXCR5-1-67 | DIVMTQSPLSLPVSLGERASISCRSSQSLVNSDGKTYLHWYQQKP |
| | | GQSPKLLIYKASNRASGVPDRFSGSGSGTDFTLKISRVEAEDVGV |
| | | YYCQQSYHTPLTFGQGTKLEIK |
| 424 | CXCR5-1-68 | DIVMTQSPLSLPVSLGERASISCRSSQSLVHSDGNTYLAWYQQKP |
| | | GQSPKLLIYKVSNRASGVPDRFSGSGSGTDFTLKISRVEAEDVGV |
| | | YYCQQSYEYPFTFGQGTKLEIK |
| 425 | CXCR5-1-69 | DIVMTQSPLSLPVSLGERASISCRSSQSLVHSDGKTYLHWYQQKP |
| | | GQSPKLLIYKVSNRFSGVPDRFSGSGSGTDFTLKISRVEAEDVGV |
| | | YYCQQGSSTPLTFGQGTKLEIK |
| 426 | CXCR5-1-70 | DIVMTQSPLSLPVSLGERASISCRSSQSLVHSNGKTYLHWYQQKP |
| | | GQSPKLLIYKVSNRFSGVPDRFSGSGSGTDFTLKISRVEAEDVGV |
| | | YYCQQGSSIPLTFGQGTKLEIK |
| 427 | CXCR5-1-71 | DIVMTQSPLSLPVSLGERASISCRSSQSLVHSDGKTYLAWYQQKP |
| | | GQSPKLLIYKASNRASGVTDRFSGSGSGTDFTLKISRVEAEDVGV |
| | | YYCFQSSSTPLTFGQGTKLEIK |
| 428 | CXCR5-1-72 | DIVMTQSPLSLPVSLGERASISCRSSQSLVHSDGKTYLHWYQQKP |
| | | GQSPKLLIYKVSNRASGVPDRFSGSGSGTDFTLKISRVEAEDVGV |
| | | YYCQQSYHYPLTFGQGTKLEIK |
| 429 | CXCR5-1-73 | DIVMTQSPLSLPVSLGERASISCRSSQSLVNSDGNTYLAWYQQKP |
| | | GQSPKLLIYKASNRFSGVPDRFSGSGSGTDFTLKISRVEAEDVGV |
| | | YYCFQGYETPLTFGQGTKLEIK |
| 430 | CXCR5-1-74 | DIVMTQSPLSLPVSLGERASISCRSSQSLVHSNGNTYLAWYQQKP |
| | | GQSPKLLIYKVSNRASGVPDRFSGSGSGTDFTLKISRVEAEDVGV |
| | | YYCQQGYHTPLTFGQGTKLEIK |
| 431 | CXCR5-1-75 | DIVMTQSPLSLPVSLGERASISCRSSQSLVHSDGNTYLHWYQQKP |
| | | GQSPKLLIYKASNRASGVPDRFSGSGSGTDFTLKISRVEAEDVGV |
| | | YYCQQSSHVPFTFGQGTKLEIK |
| 432 | CXCR5-1-76 | DIVMTQSPLSLPVSLGERASISCRSSQSLVNSDGKTYLAWYQQKP |
| | | GQSPKLLIYKASNRFSGVPDRFSGSGSGTDFTLKISRVEAEDVGV |
| | | YYCQQGYSYPLTFGQGTKLEIK |
| 433 | CXCR5-1-77 | DIVMTQSPLSLPVSLGERASISCRSSQSLVNSNGNTYLEWYQQKP |
| | | GQSPKLLIYKVSNRFSGVPDRFSGSGSGTDFTLKISRVEAEDVGV |
| | | YYCQQGSHVPFTFGQGTKLEIK |
| 434 | CXCR5-1-78 | DIVMTQSPLSLPVSLGERASISCRSSQSLVNSNGKTYLAWYQQKP |
| | | GQSPKLLIYKVSNRFSGVPDRFSGSGSGTDFTLKISRVEAEDVGV |
| | | YYCQQGYSVPLTFGQGTKLEIK |
| 435 | CXCR5-1-79 | DIVMTQSPLSLPVSLGERASISCRSSQSLVHSNGKTYLEWYQQKP |
| | | GQSPKLLIYKVSNRASGVPDRFSGSGSGTDFTLKISRVEAEDVGV |
| | | YYCFQSYSVPFTFGQGTKLEIK |
| 436 | CXCR5-1-80 | DIVMTQSPLSLPVSLGERASISCRSSQSLVHSDGNTYLAWYQQKP |
| | | GQSPKLLIYKVSNRASGVPDRFSGSGSGTDFTLKISRVEAEDVGV |
| | | YYCFQSYSYPLTFGQGTKLEIK |
| 437 | CXCR5-1-81 | DIVMTQSPLSLPVSLGERASISCRSSQSLVNSNGKTYLAWYQQKP |
| | | GQSPKLLIYKASNRFSGVPDRFSGSGSGTDFTLKISRVEAEDVGV |
| | | YYCQQSYHYPLTFGQGTKLEIK |
| 438 | CXCR5-1-82 | DIVMTQSPLSLPVSLGERASISCRSSQSLVNSNSNTYLEWYQQKP |
| | | GQSPKLLIYKASNRFSGVPDRFSGSGSGTDFTLKISRVEAEDVGV |
| | | YYCQQSSHVPFTFGQGTKLEIK |
| 439 | CXCR5-1-83 | DIVMTQSPLSLPVSLGERASISCRSSQSLVNSNGNTYLHWYQQKP |
| | | GQSPKLLIYKVSNRASGVPDRFSGSGSGTDFTLKISRVEAEDVGV |
| | | YYCQQGSHVPFTFGQGTKLEIK |
| 440 | CXCR5-1-84 | DIVMTQSPLSLPVSLGERASISCRSSQSLVHSNGKTYLHWYQQKP |
| | | GQSPKLLIYKASNRASGVPDRFSGSGSGTDFTLKISRVEAEDVGV |
| | | YYCQQGYHVPFTFGQGTKLEIK |
| 441 | CXCR5-1-85 | DIVMTQSPLSLPVSLGERASISCRSSQSLVNSDGNTYLEWYQQKP |
| | | GQSPKLLIYKASNRASGVPDRFSGSGSGTDFTLKISRVEAEDVGV |
| | | YYCQQSYHVPFTFGQGTKLEIK |
| 442 | CXCR5-1-86 | DIVMTQSPLSLPVSLGERASISCRSSQSLVNSDGNTYLHWYQQKP |
| | | GQSPKLLIYKVSNRASGVPDRFSGSGSGTDFTLKISRVEAEDVGV |
| | | YYCQQGYEYPFTFGQGTKLEIK |
| 443 | CXCR5-1-87 | DIVMTQSPLSLPVSLGERASISCRSSQSLVHSNGKTYLAWYQQKP |
| | | GQSPKLLIYKASNRFSGVPDRFSGSGSGTDFTLKISRVEAEDVGV |
| | | YYCQQSYSYALTFGQGTKLEIK |
| 444 | CXCR5-1-88 | DIVMTQSPLSLPVSLGERASISCRSSQSLVNSDGKTYLHWYQQKP |
| | | GQSPKLLIYKASNRASGVPDRFSGSGSGTDFTLKISRVEAEDVGV |
| | | YYCQQGSEVPFTFGQGTKLEIK |
| 445 | CXCR5-1-89 | DIVMTQSPLSLPVSLGERASISCRSSQSLVHSDGKTYLAWYQQKP |
| | | GQSPKLLIYKVSNRASGVPDRFSGSGSGTDFTLKISRVEAEDVGV |
| | | YYCQQSYSVPFTFGQGTKLEIK |
| 446 | CXCR5-1-90 | DIVMTQSPLSLPVSLGERASISCRSSQSLVHSDGKTYLHWYQQKP |
| | | GQSPKLLIYKVSNRFSGVPDRFSGSGSGTDFTLKISRVEAEDVGV |
| | | YYCFQGYSYPFTFGQGTKLEIK |
| 447 | CXCR5-1-91 | DIVMTQSPLSLPVSLGERASISCRSSQSLVHSDGNTYLAWYQQKP |
| | | GQSPKLLIYKVSNRASGVPDRFSGSGSGTDFTLKISRVEAEDVGV |
| | | YYCQQGSSYPLTFGQGTKLEIK |
| 448 | CXCR5-1-92 | DIVMTQSPLSLPVSLGERASISCRSSQSLVNSDGNTYLHWYQQKP |
| | | GQSPKLLIYKVSNRFSGVPDRFSGSGSGTDFTLKISRVEAEDVGV |
| | | YYCQQSYHTPFTFGQGTKLEIK |
| 449 | CXCR5-1-93 | DIVMTQSPLSLPVSLGERASISCRSSQSLVNSNGNTYLHWYQQKP |
| | | GQSPKLLIYKASNRASGVPDRFSGSGSGTDFTLKISRVEAEDVGV |
| | | YYCQQGYEYPLTFGQGTKLEIK |
| 450 | CXCR5-1-94 | DIVMTQSPLSLPVSLGERASISCRSSQSLVHSDGNTYLAWYQQKP |
| | | GQSPKLLIYKVSNRASGVPDRFSGSGSGTDFTLKISRVEAEDVGV |
| | | YYCQQSYSYPLTFGQGTKLEIK |
| 451 | CXCR5-1-95 | DIVMTQSPLSLPVSLGERASISCRSSQSLVHSNGNTYLHWYQQKP |
| | | GQSPKLLIYKASNRASGVPDRFSGSGSGTDFTLKISRVEAEDVGV |
| | | YYCQQGSEYPFTFGQGTKLEIK |
| 452 | CXCR5-1-96 | DIVMTQSPLSLPVSLGERASISCRSSQSLVHSNGKTYLEWYQQKP |
| | | GQSPKLLIYKASNRASGVPDRFSGSGSGTDFTLKISRVEAEDVGV |
| | | YYCFQSSSTPFTFGQGTKLEIK |
| 453 | CXCR5-1-97 | DIVMTQSPLSLPVSLGERASISCRSSQSLVHSDGKTYLAWYQQKP |
| | | GQSPKLLIYKVSNRFSGVPDRFSGSGSGTDFTLKISRVEAEDVGV |
| | | YYCQQSYSYPLTFGQGTKLEIK |
| 454 | CXCR5-1-98 | DIVMTQSPLSLPVSLGERASISCRSSQSLVHSDGNTYLEWYQQKP |
| | | GQSPKLLIYKVSNRASGVPDRFSGSGSGTDFTLKISRVEAEDVGV |
| | | YYCQQGYSVPFTFGQGTKLEIK |
| 455 | CXCR5-1-99 | DIVMTQSPLSLPVSLGERASISCRSSQSLVNSDGKTYLEWYQQKP |
| | | GQSPKLLIYKASNRFSGVPDRFSGSGSGTDFTLKISRVEAEDVGV |
| | | YYCQQSYSVPFTFGQGTKLEIK |
| 456 | CXCR5-1-100 | DIVMTQSPLSLPVSLGERASISCRSSQSLVHSNGNTYLHWYQQKP |
| | | GQSPKLLIYKVSNRASGVPDRFSGSGSGTDFTLKISRVEAEDVGV |
| | | YYCFQSSSYPFTFGQGTKLEIK |
| 457 | CXCR5-1-101 | DIVMTQSPLSLPVSLGERASISCRSSQSLVNSNGNTYLHWYQQKP |
| | | GQSPKLLIYKASNRASGVPDRFSGSGSGTDFTLKISRVEAEDVGV |
| | | YYCQQGYHVPFTFGQGTKLEIK |
| 458 | CXCR5-1-102 | DIVMTQSPLSLPVSLGERASISCRSSQSLVHSDGNTYLEWYQQKP |
| | | GQSPKLLIYKVSNRFSGVPDRFSGSGSGTDFTLKISRVEAEDVGV |
| | | YYCQQSYSTPFTFGQGTKLEIK |
| 459 | CXCR5-1-103 | DIVMTQSPLSLPVSLGERASISCRSSQSLVNSNGKTYLEWYQQKP |
| | | GQSPKLLIYKVSNRASGVPDRFSGSGSGTDFTLKISRVEAEDVGV |
| | | YYCQQSYHYPFTFGQGTKLEIK |
| 460 | CXCR5-1-104 | DIVMTQSPLSLPVSLGERASISCRSSQSLVHSDGNTYLHWYQQKP |
| | | GQSPKLLIYKVSNRFSGVPDRFSGSGSGTDFTLKISRVEAEDVGV |
| | | YYCQQSSHYPLTFGQGTKLEIK |
| 461 | CXCR5-1-105 | DIVMTQSPLSLPVSLGERASISCRSSQSLVHSDGKTYLAWYQQKP |
| | | GQSPKLLIYKASNRFSGVPDRFSGSGSGTDFTLKISRVEAEDVGV |
| | | YYYFQGSHTPFTFGQGTKLEIK |
| 462 | CXCR5-1-106 | DIVMTQSPLSLPVSLGERASISCRSSQSLVHSDGKTYLHWYQQKP |
| | | GQSPKLLIYKASNRFSGVPDRFSGSGSGTDFTLKISRVEAEDVGV |
| | | YYCFQGSSVPLTFGQGTKLEIK |
| 463 | CXCR5-1-107 | DIVMTQSPLSLPVSLGERASISCRSSQSLVNSNGNTYLEWYQQKP |
| | | GQSPKLLIYKASNRFSGVPDRFSGSGSGTDFTLKISRVEAEDVGV |
| | | YYCFQSYHVPFTFGQGTKLEIK |
| 464 | CXCR5-1-108 | DIVMTQSPLSLPVSLGERASISCRSSQSLVHSNGKTYLAWYQQKP |
| | | GQSPKLLIYKASNRLSGVPDRFSGSGSGTDFTLKISRVEAEDVGV |
| | | YYCQQSYSTPFTFGQGTKLEIK |
| 465 | CXCR5-1-109 | DIVMTQSPLSLPVSLGERASISCRSSQSLVNSNGNTYLHWYQQKP |
| | | GQSPKLLIYKASNRASGVPDRFSGSGSGTDFTLKISRVEAEDVGV |
| | | YYCQQGSEYPFTFGQGTKLEIK |
| 466 | CXCR5-1-110 | DIVMTQSPLSLPVSLGERASISCRSSQSLVNSDGKTYLHWYQQKP |
| | | GQSPKLLIYKVSNRFSGVPDRFSGSGSGTDFTLKISRVEAEDVGV |
| | | YYCQQSSHVPFTFGQGTKLEIK |
| 467 | CXCR5-1-111 | DIVMTQSPLSLPVSLGERASISCRSSQSLVNSDGNTYLAWYQQKP |
| | | GQSPKLLIYKASNRASGVPDRFSGSGSGTDFTLKISRVEAEDVGV |
| | | YYCQQGYSTPFTFGQGTKLEIK |
| 468 | CXCR5-1-112 | DIVMTQSPLSLPVSLGERASISCRSSQSLVNSDGNTYLHWYQQKP |
| | | GQSPKLLIYKASNRASGVPDRFSGSGSGTDFTLKISRVEAEDVGV |
| | | YYCQQGSEVPLTFGQGTKLEIK |
| 469 | CXCR5-1-113 | DIVMTQSPLSLPVSLGERASISCRSSQSLVHSNGKTYLAWYQQKP |
| | | GQSPKLLIYKASNRFSGVPDRFSGSGSGTDFTLKISRVEAEDVGV |
| | | YYCFQGYSTPLTFGQGTKLEIK |
| 470 | CXCR5-1-114 | DIVMTQSPLSLPVSLGERASISCRSSQSLVHSNGKTYLHWYQQKP |
| | | GQSPKLLIYKVSNRASGVPDRFSGSGSGTDFTLKISRVEAEDVGV |
| | | YYCFQSSEVPFTFGQGTKLEIK |
| 471 | CXCR5-1-115 | DIVMTQSPLSLPVSLGERASISCRSSQSLVNSDGNTYLEWYQQKP |
| | | GQSPKLLIYKASNRFSGVPDRFSGSGSGTDFTLKISRVEAEDVGV |
| | | YYCFQSSSVPLTFGQGTKLEIK |
| 472 | CXCR5-1-116 | DIVMTQSPLSLPVSLGERASISCRSSQSLVHSDGKTYLHWYQQKP |
| | | GQSPKLLIYKASNRFSGVPDRFSGSGSGTDFTLKISRVEAEDVGV |
| | | YYCQQGYSTPLTFGQGTKLEIK |
| 473 | CXCR5-1-117 | DIVMTQSPLSLPVSLGERASISCRSSQSLVHSNGNTYLAWYQQKP |
| | | GQSPKLLIYKASNRFSGVPDRFSGSGSGTDFTLKISRVEAEDVGV |
| | | YYCQQGSEVPLTFGQGTKLEIK |
| 474 | CXCR5-1-118 | DIVMTQSPLSLPVSLGERASISCRSSQSLVNSDGKTYLHWYQQKP |
| | | GQSPKLLIYKASNRFSGVPDRFSGSGSGTDFTLKISRVEAEDVGV |
| | | YYCQQGSHVPLTFGQGTKLEIK |
| 475 | CXCR5-1-119 | DIVMTQSPLSLPVSLGERASISCRSSQSLVHSNGNTYLHWYQQKP |
| | | GQSPKLLIYKVSNRFSGVPDRFSGSGSGTDFTLKISRVEAEDVGV |
| | | YYCQQGYSVPFTFGQGTKLEIK |
| 476 | CXCR5-1-120 | DIVMTQSPLSLPVSLGERASISCRSSQSLVNSDGKTYLEWYQQKP |
| | | GQSPKLLIYKVSNRASGVPDRFSGSGSGTDFTLKISRVEAEDVGV |
| | | YYCFQGYEYPLTFGQGTKLEIK |
| 477 | CXCR5-1-121 | DIVMTQSPLSLPVSLGERASISCRSSQSLVHSDGNTYLAWYQQKP |
| | | GQSPKLLIYKASNRASGVPDRFSGSGSGTDFTLKISRVEAEDVGV |
| | | YYCQQGYHYPLTFGQGTKLEIK |
| 478 | CXCR5-1-122 | DIVMTQSPLSLPVSLGERASISCRSSQSLVHSDGKTYLAWYQQKP |
| | | GQSPKLLIYKASNRASGVPDRFSGSGSGTDFTLKISRVEAEDVGV |
| | | YYCQQGYHVPFTFGQGTKLEIK |
| 479 | CXCR5-1-123 | DIVMTQSPLSLPVSLGERASISCRSSQSLVNSDGNTYLEWYQQKP |
| | | GQSPKLLIYKVSNRFSGVPDRFSGSGSGTDFTLKISRVEAEDVGV |
| | | YYCFQGSSYPFTFGQGTKLEIK |
| 480 | CXCR5-1-124 | DIVMTQSPLSLPVSLGERASISCRSSQSLVHSDGKTYLEWYQQKP |
| | | GQSPKLLIYKVSNRASGVPDRFSGSGSGTDFTLKISRVEAEDVGV |
| | | YYCFQSYHYPLTFGQGTKLEIK |
| 481 | CXCR5-1-125 | DIVMTQSPLSLPVSLGERASISCRSSQSLVHSDGKTYLAWYQQKP |
| | | GQSPKLLIYKVSNRFSGVPDRFSGSGSGTDFTLKISRVEAEDVGV |
| | | YYCQQSSHTPFTFGQGTKLEIK |
| 482 | CXCR5-1-126 | DIVMTQSPLSLPVSLGERASISCRSSQSLVHSDGKTYLHWYQQKP |
| | | GQSPKLLIYKASNRASGVPDRFSGSGSGTDFTLKISRVEAEDVGV |
| | | YYCQQGYEYPFTFGQGTKLEIK |
| 483 | CXCR5-1-127 | DIVMTQSPLSLPVSLGERASISCRSSQSLVHSNGKTYLAWYQQKP |
| | | GQSPKLLIYKVSNRFSGVPDRFSGSGSGTDFTLKISRVEAEDVGV |
| | | YYCQQGYEVPLTFGQGTKLEIK |
| 484 | CXCR5-1-128 | DIVMTQSPLSLPVSLGERASISCRSSQSLVNSNGKTYLAWYQQKP |
| | | GQSPKLLIYKASNRFSGVPDRFSGSGSGTDFTLKISRVEAEDVGV |
| | | YYCQQSYHYPFTFGQGTKLEIK |
| 485 | CXCR5-1-129 | DIVMTQSPLSLPVSLGERASISCRSSQSLVHSNGNTYLAWYQQKP |
| | | GQSPKLLIYKASNRFSGVPDRFSGSGSGTDFTLKISRVEAEDVGV |
| | | YYCQQGYSVPFTFGQGTKLEIK |
| 486 | CXCR5-1-130 | DIVMTQSPLSLPVSLGERASISCRSSQSLVNSNGKTYLHWYQQKP |
| | | GQSPKLLIYKVSNRFSGVPDRFSGSGSGTDFTLKISRVEAEDVGV |
| | | YYCFQSSHTPLTFGQGTKLEIK |
| 487 | CXCR5-1-131 | DIVMTQSPLSLPVSLGERASISCRSSQSLVHSDGNTYLAWYQQKP |
| | | GQSPKLLIYKVSNRFSGVPDRFSGSGSGTDFTLKISRVEAEDVGV |
| | | YYCFQSSSTPLTFGQGTKLEIK |
| 488 | CXCR5-1-132 | DIVMTQSPLSLPVSLGERASISCRSSQSLVNSDGNTYLAWYQQKP |
| | | GQSPKLLIYKVSNRFSGVPDRFSGSGSGTDFTLKISRVEAEDVGV |
| | | YYCFQSSEYPLTFGQGTKLEIK |
| 489 | CXCR5-1-133 | DIVMTQSPLSLPVSLGERASISCRSSQSLVHSNGKTYLAWYQQKP |
| | | GQSPKLLIYKASNRFSGVPDRFSGSGSGTDFTLKISRVEAEDVGV |
| | | YYCFQSYHTPFTFGQGTKLEIK |
| 490 | CXCR5-1-134 | DIVMTQSPLSLPVSLGERASISCRSSQSLVHSNGNTYLAWYQQKP |
| | | GQSPKLLIYKVSNRASGVPDRFSGSGSGTDFTLKISRVEAEDVGV |
| | | YYCQQSYSYPLTFGQGTKLEIK |
| 491 | CXCR5-1-135 | DIVMTQSPLSLPVSLGERASISCRSSQSLVNSDGKTYLAWYQQKP |
| | | GQSPKLLIYKASNRASGVPDRFSGSGSGTDFTLKISRVEAEDVGV |
| | | YYCFQSSHVPFTFGQGTKLEIK |
| 492 | CXCR5-1-136 | DIVMTQSPLSLPVSLGERASISCRSSQSLVNINGKTYLHWYQQKP |
| | | GQSPKLLIYKASNRFSGVPDRFSGSGSGTDFTLKISRVEAEDVGV |
| | | YYCQQGSETPFTFGQGTKLEIK |
| 493 | CXCR5-1-137 | DIVMTQSPLSLPVSLGERASISCRSSQSLVHSNGNTYLEWYQQKP |
| | | GQSPKLLIYKASNRASGVPDRFSGSGSGTDFTLKISRVEAEDVGV |
| | | YYCQQSSSYPFTFGQGTKLEIK |
| 494 | CXCR5-1-138 | DIVMTQSPLSLPVSLGERASISCRSSQSLVHSNGNTYLHWYQQKP |
| | | GQSPKLLIYKASNRASGVPDRFSGSGSGTDFTLKISRVEAEDVGV |
| | | YYCQQGSEYPFTFGQGTKLEIK |
| 495 | CXCR5-1-139 | DIVMTQSPLSLPVSLGERASISCRSSQSLVNSDGKTYLEWYQQKP |
| | | GQSPKLLIYKVSNRASGVPDRFSGSGSGTDFTLKISRVEAEDVGV |
| | | YYCFQGSSYPLTFGQGTKLEIK |
| 496 | CXCR5-1-140 | DIVMTQSPLSLPVSLGERASISCRSSQSLVNSNGNTYLEWYQQKP |
| | | GQSPKLLIYKASNRASGVPDRFSGSGSGTDFTLKISRVEAEDVGV |
| | | YYCFQGSEVPLTFGQGTKLEIK |
| 497 | CXCR5-1-141 | DIVMTQSPLSLPVSLGERASISCRSSQSLVNSDGNTYLAWYQQKP |
| | | GQSPKLLIYKASNRASGVPDRFSGSGSGTDFTLKISRVEAEDVGV |
| | | YYCQQSSEYPLTFGQGTKLEIK |
| 498 | CXCR5-1-142 | DIVMTQSPLSLPVSLGERASISCRSSQSLVNSNGNTYLHWYQQKP |
| | | GQSPKLLIYKASNRASGVPDRFSGSGSGTDFTLKISRVEAEDVGV |
| | | YYCQQSYHTPLTFGQGTKLEIK |
| 499 | CXCR5-1-143 | DIVMTQSPLSLPVSLGERASISCRSSQSLVHSNGKTYLEWYQQKP |
| | | GQSPKLLIYKASNRFSGVPDRFSGSGSGTDFTLKISRVEAEDVGV |
| | | YYCQQGSSYPLTFGQGTKLEIK |
| 500 | CXCR5-1-144 | DIVMTQSPLSLPVSLGERASISCRSSQSLVHSNGKTYLEWYQQKP |
| | | GQSPKLLIYKVSNRASGVPDRFSGSGSGTDFTLKISRVEAEDVGV |
| | | YYCQQSYSVPFTFGQGTKLEIK |
| 501 | CXCR5-1-145 | DIVMTQSPLSLPVSLGERASISCRSSQSLVHSDGKTYLHWYQQKP |
| | | GQSPKLLIYKVSNRASGVPDRFSGSGSGTDFTLKISRVEAEDVGV |
| | | YYCQQSSHYPLTFGQGTKLEIK |
| 502 | CXCR5-1-146 | DIVMTQSPLSLPVSLGERASISCRSSQSLVHSDGNTYLAWYQQKP |
| | | GQSPKLLIYKASNRFSGVPDRFSGSGSGTDFTLKISRVEAEDVGV |
| | | YYCQQGYEVPFTFGQGTKLEIK |
| 503 | CXCR5-1-147 | DIVMTQSPLSLPVSLGERASISCRSSQSLVHSDGKTYLHWYQQKP |
| | | GQSPKLLIYKVSNRASGVPDRFSGSGSGTDFTLKISRVEAEDVGV |
| | | YYCQQGSETPLTFGQGTKLEIK |
| 504 | CXCR5-1-148 | DIVMTQSPLSLPVSLGERASISCRSSQSLVNSDGKTYLAWYQQKP |
| | | GQSPKLLIYKASNRASGVPDRFSGSGSGTDFTLKISRVEAEDVGV |
| | | YYCFQGYNTPFTFGQGTKVEIK |
| 505 | CXCR5-1-149 | DIVMTQSPLSLPVSLGERASISCRSSQSLVNSNGKTYLEWYQQKP |
| | | GQSPKLLIYKASNRFSGVPDRFSGSGSGTDFTLKISRVEAEDVGV |
| | | YYCFQGYETPLTFGQGTKLEIK |
| 506 | CXCR5-1-150 | DIVMTQSPLSLPVSLGERASISCRSSQSLVNSDGNTYLAWYQQKP |
| | | GQSPKLLIYKASNRASGVPDRFSGSGSGTDFTLKISRVEAEDVGV |
| | | YYCFQSSETPFTFGQGTKLEIK |
| 507 | CXCR5-1-151 | DIVMTQSPLSLPVSLGERASISCRSSQSLVHSNGNTYLHWYQQKP |
| | | GQSPKLLIYKASNRASGVPDRFSGSGSGTDFTLKISRVEAEDVGV |
| | | YYCQQSYHYPFTFGQGTKLEIK |
| 508 | CXCR5-1-152 | DIVMTQSPLSLPVSLGERASISCRSSQSLVHSDGNTYLEWYQQKP |
| | | GQSPKLLIYKVSNRASGVPDRFSGSGSGTDFTLKISRVEAEDVGV |
| | | YYCFQSYSVPLTFGQGTKLEIK |
| 509 | CXCR5-1-153 | DIVMTQSPLSLPVSLGERASISCRSSQSLVNSDGKTYLAWYQQKP |
| | | GQSPKLLIYKVSNRASGVPDRFSGSGSGTDFTLKISRVEAEDVGV |
| | | YYCFQSYSVPFTFGQGTKLEIK |
| 510 | CXCR5-1-154 | DIVMTQSPLSLPVSLGERASISCRSSQSLVNSDGKTYLEWYQQKP |
| | | GQSPKLLIYKASNRASGVPDRFSGSGSGTDFTLKISRVEAEDVGV |
| | | YYCFQSYSTPFTFGQGTKLEIK |
| 511 | CXCR5-1-155 | DIVMTQSPLSLPVSLGERASISCRSSQSLVHSNGKTYLHWYQQKP |
| | | GQSPKLLIYKASNRASGVPDRFSGSGSGTDFTLKISRVEAEDVGV |
| | | YYCQQGSSVPLTFGQGTKLEIK |
| 512 | CXCR5-1-156 | DIVMTQSPLSLPVSLGERASISCRSSQSLVNSNGKTYLAWYQQKP |
| | | GQSPKLLIYKASNRASGVPDRFSGSGSGTDFTLKISRVEAEDVGV |
| | | YYCQQGSETPLTFGQGTKLEIK |
| 513 | CXCR5-1-157 | DIVMTQSPLSLPVSLGERASISCRSSQSLVHSNGKTYLAWYQQKP |
| | | GQSPKLLIYKASNRASGVPDRFSGSGSGTDFTLKISRVEAEDVGV |
| | | YYCFQGSEYPLTFGQGTKLEIK |
| 514 | CXCR5-1-158 | DIVMTQSPLSLPVSLGERASISCRSSQSLVHSDGKTYLHWYQQKP |
| | | GQSPKLLIYKVSNRFSGVPDRFSGSGSGTDFTLKISRVEAEDVGV |
| | | YYCFQGSETPLTFGQGTKLEIK |
| 515 | CXCR5-1-159 | DIVMTQSPLSLPVSLGERASISCRSSQSLVNSNGKTYLAWYQQKP |
| | | GQSPKLLIYKASNRFSGVPDRFSGSGSGTDFTLKISRVEAEDVGV |
| | | YYCQQSSEYPFTFGQGTKLEIK |
| 516 | CXCR5-1-160 | DIVMTQSPLSLPVSLGERASISCRSSQSLVHSNGKTYLEWYQQKP |
| | | GQSPKLLIYKVSNRFSGVPDRFSGSGSGTDFTLKISRVEAEDVGV |
| | | YYCQQSYHVPFTFGQGTKLEIK |
| 517 | CXCR5-1-161 | DIVMTQSPLSLPVSLGERASISCRSSQSLVHSDGKTYLHWYQQKP |
| | | GQSPKLLIYKASNRFSGVPDRFSGSGSGTDFTLKISRVEAEDVGV |
| | | YYCQQSSEVPFTFGQGTKLEIK |
| 518 | CXCR5-1-162 | RYSLTQSPLSLPVSLGERASISCRSSQSLVHSNGNTYLHWYQQKP |
| | | GQSPKLLIYKASNRASGVPDRFSGSGSGTDFTLKISRVEAEDVGV |
| | | YYCQQGSHTPLTFGQGTKLEIK |
| 519 | CXCR5-1-163 | DIVMTQSPLSLPVSLGERASISCRSSQSLVHSNGNTYLAWYQQKP |
| | | GQSPKLLIYKASNRFSGVPDRFSGSGSGTDFTLKISRVEAEDVGV |
| | | YYCQQSYSYPFTFGQGTKLEIK |
| 520 | CXCR5-1-164 | DIVMTQSPLSLPVSLGERASISCRSSQSLVHSNGNTYLHWYQQKP |
| | | GQSPKLLIYKASNRASGVPDRFSGSGSGTDFTLKISRVEAEDVGV |
| | | YYCQQSSHYPFTFGQGTKLEIK |
| 521 | CXCR5-1-165 | DIVMTQSPLSLPVSLGERASISCRSSQSLVNSDGNTYLAWYQQKP |
| | | GQSPKLLIYKASNRASGVPDRFSGSGSGTDFTLKISRVEAEDVGV |
| | | YYCFQSSETPFTFGQGTKLEIK |
| 522 | CXCR5-17-3 | DIQMTQSPSSLSASVGDRVTITCRTSQSISIYLNWYQQKPGKAPK |
| | | LLIYAASRVQSGVPSRFSGSGSGTDFTLTISSLQPEDFATYYCQE |
| | | SYSIPFTFGGGTKVEIK |
| 523 | CXCR5-17-11 | QSVLTQPPSVSAAPGQKVTISCSGSSSNIENNDVSWYQQLPGTAP |
| | | KLLIYQNNERPSGIPDRFSGSKSGTSATLGITGLQTGDEADYYCA |
| | | TWDRSLSVVFGGGTKLT |
| 524 | CXCR5-50-18 | DIQMTQSPSSLSASVGDRVTITCRASQSIYNYLNWYQQKPGKAPK |
| | | LLIYAASGLQSGVPSRFSGSGSGTDFTLTISSLQPEDFATYYCQQ |
| | | SFNTPLTFGGGTKVEIK |
| 525 | CXCR5-16 | DIVMTQAAPSVAVTPGASVSISCRSSKSLLHSSGKTYLYWFLQRP |
| | | GQSPQLLIYRLSSLASGVPDRFSGSGSGTAFTLRISRVEAEDVGV |
| | | YYCMQHLEYPYTFGGGTKLEIK |

TABLE 11
CXCR5 Variable Heavy Chain CDR's

| | SEQ | | SEQ | | SEQ | |
|---|---|---|---|---|---|---|
| | ID | | ID | | ID | |
| Variant | NO | CDR1 | NO | CDR2 | NO | CDR3 |
| CXCR5-1-1 | 526 | GFTFSDY | 663 | SPDGSI | 978 | KDVWVIFSTHDGAYGFDV |
| CXCR5-1-2 | 527 | GRAFIAY | 664 | SWSGGI | 979 | ASPGGAINYGRGYD |
| CXCR5-1-3 | 528 | GFTFSSY | 665 | SPNGGN | 980 | HDHDYYAFDY |
| CXCR5-1-4 | 529 | GGTFSSY | 666 | NPGDGY | 981 | HTSSNGVYSTWFAY |
| CXCR5-1-5 | 530 | GGTFSLY | 667 | SWSGGS | 982 | NESDAYN |
| CXCR5-1-6 | 531 | GFTFSSY | 668 | SYSGGE | 983 | DDDGGDAFDY |
| CXCR5-1-7 | 532 | GRAFIAY | 669 | SWSGGI | 984 | ASPGGAINYGRGYD |
| CXCR5-1-8 | 533 | GGTFSDY | 670 | NPYDGY | 985 | DYSSSFVFHAMDY |
| CXCR5-1-9 | 534 | GFTFSDY | 671 | SYDGSN | 986 | IRTNYFGFDY |
| CXCR5-1-10 | 535 | GRAFIAY | 672 | SWSGGI | 987 | ASPGGAINYGRGYD |
| CXCR5-1-11 | 536 | GRAFIAY | 673 | SWSGGI | 988 | ASPGGAINYGRGYD |
| CXCR5-1-12 | 537 | GFTFSDY | 674 | SYSGSE | 989 | HLTNYDPFDY |
| CXCR5-1-13 | 538 | GFTFSDY | 675 | SP | 990 | GDTNWFAFDY |
| CXCR5-1-14 | 539 | GFTFSNY | 676 | SPNGGN | 991 | ILTGGYPFDY |
| CXCR5-1-15 | 540 | GGTFSLY | 677 | SWSGGS | 992 | NESDAYN |
| CXCR5-1-16 | 541 | GFTFSDY | 678 | SYDGSN | 993 | HRHYGYPFDY |
| CXCR5-1-17 | 542 | GFTFSNY | 679 | SYSGGI | 994 | HRHYNYAFDY |
| CXCR5-1-18 | 543 | GGTFSDY | 680 | RPGDGY | 995 | FGHSGRSFAY |
| CXCR5-1-19 | 544 | GFTFSSY | 681 | SPSGGN | 996 | GKDDRLDYLGYYFDY |
| CXCR5-1-20 | 545 | GFTFSDY | 682 | SPDGGN | 997 | HLDGGDGFDY |
| CXCR5-1-21 | 546 | GFTFSDY | 683 | SYDGSE | 998 | DDRGYFGFDY |
| CXCR5-1-22 | 547 | GFTFSDY | 684 | SYSGSI | 999 | PSYLDSVYGHDGYYTLDV |
| CXCR5-1-23 | 548 | GGTFSSY | 685 | RPGDGY | 1000 | SLLPNTVTAYMDY |
| CXCR5-1-24 | 549 | GFTFSSY | 686 | SYDGGI | 1001 | DDDGWYPFDY |
| CXCR5-1-25 | 550 | GGTFSSY | 687 | RPYDGY | 1002 | HGYKSNYLSYMDY |
| CXCR5-1-26 | 551 | GFTFSSY | 688 | SYSGGN | 1003 | DDHGWYPFDY |
| CXCR5-1-27 | 552 | GFTFSDY | 689 | SPSGSI | 1004 | GRHNNFGFDY |
| CXCR5-1-28 | 553 | GFTFSNY | 690 | SYDGSI | 1005 | ILDYYFPFDY |
| CXCR5-1-29 | 554 | GGTFSNY | 691 | RPGNGY | 1006 | SESSFYVYQTAFAY |
| CXCR5-1-30 | 555 | GGTFSSY | 692 | RPGDGY | 1007 | SGLWYNVFNAMDY |
| CXCR5-1-31 | 556 | GFTFSDY | 693 | SPSGGN | 1008 | KSHYFGFWGNNGARTFDY |
| CXCR5-1-32 | 557 | GFTFSDY | 694 | SYDGSN | 1009 | GELNRGDRYGYRYHKHRGMDV |
| CXCR5-1-33 | 558 | GGTFSNY | 695 | RPNNGE | 1010 | DLYWNFGGYAMDY |
| CXCR5-1-34 | 559 | GGTFSDY | 696 | NPNDGY | 1011 | SFFYYHYGAFDY |
| CXCR5-1-35 | 560 | GFTFSSY | 697 | SYDGGN | 1012 | IDGYYIRWTYYHARTFDY |
| CXCR5-1-36 | 561 | GGTFSSY | 698 | RPNNGE | 1013 | PSRPSHYSAFSHPYYMDY |
| CXCR5-1-37 | 562 | GFTFSDY | 699 | SYSGSN | 1014 | GPQSWYGLWGQNFDY |
| CXCR5-1-38 | 563 | GFTFSNY | 700 | SPSGSE | 1015 | HLDNGFPFDY |
| CXCR5-1-39 | 564 | GFTFSDY | 701 | SYDGSI | 1016 | IRHRFILWRNYGARGMDY |
| CXCR5-1-40 | 565 | GFTFSSY | 702 | SPSGSE | 1017 | DRDRYLDLHRYPFDY |
| CXCR5-1-41 | 566 | GGTFSSY | 703 | NPNNGY | 1018 | LLSKSNNLHAMDY |
| CXCR5-1-42 | 567 | GGTFSSY | 704 | RPGNGY | 1019 | GGAYYYTSITSHGFQFDY |
| CXCR5-1-43 | 568 | GGTFSDY | 705 | RPYDGY | 1020 | STIGYDYGYYGFDY |
| CXCR5-1-44 | 569 | GFTFSDY | 706 | ANKYYA | 1021 | RVYWDGFYTQDYYYTLDV |
| CXCR5-1-45 | 570 | GFTFSDY | 707 | SYNGGI | 1022 | DTSSWTPLLTFYFDY |
| CXCR5-1-46 | 571 | GFTFSDY | 708 | SYDGSE | 1023 | HLHDNDAFDY |
| CXCR5-1-47 | 572 | GFTFSNY | 709 | SYSGGI | 1024 | HRTDGYPFDY |
| CXCR5-1-48 | 573 | GFTFSNY | 710 | SYSGGN | 1025 | KDGLYDRSGYRHARTFDY |
| CXCR5-1-49 | 574 | GFTFSDY | 711 | SPSGGE | 1026 | DEDYYYDGSRFNGGYYGPMDV |
| CXCR5-1-50 | 575 | GFTFSDY | 712 | SPSGGN | 1027 | RDYWYSVYTHRYARTFDV |
| CXCR5-1-51 | 576 | GFTFSNY | 713 | SYDGSI | 1028 | DRHGNYAFDY |
| CXCR5-1-52 | 577 | GGTFSSY | 714 | RPYDGY | 1029 | RGYSRDWFAY |
| CXCR5-1-53 | 578 | GGTFSDY | 715 | RPGDGE | 1030 | LFFSSDDFAFAFDY |
| CXCR5-1-54 | 579 | GFTFSDY | 716 | SYSGSN | 1031 | DLTGYYPFDY |
| CXCR5-1-55 | 580 | GFTFSDY | 717 | SPSGSN | 1032 | DDDGYLDYLRFNFDY |
| CXCR5-1-56 | 581 | GGTFSNY | 718 | RPNNGE | 1033 | LYGPNTVTYYMDY |
| CXCR5-1-57 | 582 | GGTFSSY | 719 | NPNNGE | 1034 | GSAYYHYYYYSHGGAFAY |
| CXCR5-1-58 | 583 | GFTFSSY | 720 | SPDGGN | 1035 | RVHWYGRYTHNYYYGLDV |
| CXCR5-1-59 | 584 | GGTFSSY | 721 | NPGDGY | 1036 | HESGYGVGAYGFAY |
| CXCR5-1-60 | 585 | GGTFSDY | 722 | NPYNGY | 1037 | PGEPYDTYITSFGFQMDY |
| CXCR5-1-61 | 586 | GFTFSNY | 723 | SYDGSE | 1038 | GRSDYYDLHTHNFDY |
| CXCR5-1-62 | 587 | GGTFSSY | 724 | NPGDGY | 1039 | LESKYDVGSAMDY |
| CXCR5-1-63 | 588 | GFTFSSY | 725 | SPSGGN | 1040 | ISVRYIRTGNDYARTMDY |
| CXCR5-1-64 | 589 | GFTFSSY | 726 | SYSGSN | 1041 | IDHWDGRWGYYHARTMDV |
| CXCR5-1-65 | 590 | GFTFSSY | 727 | SPNGGE | 1042 | GTSRYLPLHTYYFDY |
| CXCR5-1-66 | 591 | GFTFSDY | 728 | SYSGGE | 1043 | IRTYNYPFDY |
| CXCR5-1-67 | 592 | GGTFSNY | 729 | NPYNGY | 1044 | HYLWYYYFAAMDY |
| CXCR5-1-68 | 593 | GFTFSSY | 730 | SYSGSN | 1045 | IDTDNFAFDY |
| CXCR5-1-69 | 594 | GFTFSDY | 731 | SPDGGI | 1046 | DEDYYGIFYGQNHYFGFGMDV |
| CXCR5-1-70 | 595 | GGTFSSY | 732 | RPNNGY | 1047 | PSAYIDVSYTSFYGYFAY |
| CXCR5-1-71 | 596 | GFTFSSY | 733 | SPSGGN | 1048 | DRDYNFAFDY |
| CXCR5-1-72 | 597 | GFTFSSY | 734 | SPDGSN | 1049 | DRLHYGDSWRYNHHKYGGMDV |
| CXCR5-1-73 | 598 | GFTFSNY | 735 | SYDGGN | 1050 | IRDYGYGFDY |
| CXCR5-1-74 | 599 | GGTFSSY | 736 | RPYDGY | 1051 | SYYKHNNLAYMDY |
| CXCR5-1-75 | 600 | GGTFSSY | 737 | RPGNGE | 1052 | HLSKYFVTNAMDY |
| CXCR5-1-76 | 601 | GFTFSNY | 738 | SPDGGI | 1053 | IVGRDDRSGNDYYRTMDY |
| CXCR5-1-77 | 602 | GFTFSNY | 739 | SYSGGE | 1054 | IDHDNYGFDY |
| CXCR5-1-78 | 603 | GGTFSSY | 740 | RPYNGY | 1055 | DFFGNYVYSFWFDY |
| CXCR5-1-79 | 604 | GFTFSSY | 741 | SYDGGE | 1056 | DELYYYIGWGHDHHFHRGMDV |
| CXCR5-1-80 | 605 | GFTFSDY | 742 | SYSGSE | 1057 | GDRGYYSFWTHPFDY |
| CXCR5-1-81 | 606 | GFTFSDY | 743 | SPDGGE | 1058 | DRTNGFGFDY |
| CXCR5-1-82 | 607 | GFTFSDY | 744 | SPDGGN | 1059 | GELHRGSSTRYDFHYYRGMDV |
| CXCR5-1-83 | 608 | GFTFSDY | 745 | SYSGGI | 1060 | PSYYDSLWRHRYYRTFDV |
| CXCR5-1-84 | 609 | GFTFSSY | 746 | SPDGSI | 1061 | HRTDNFPFDY |
| CXCR5-1-85 | 610 | GGTFSNY | 747 | NPYNGE | 1062 | SPFGFTYYSTYFAY |
| CXCR5-1-86 | 611 | GFTFSNY | 748 | SPSGGI | 1063 | PRYLFGRTGNRYYYTLDV |
| CXCR5-1-87 | 612 | GGTFSSY | 749 | RPYDGY | 1064 | HYSDYTDTSYMDY |
| CXCR5-1-88 | 613 | GFTFSDY | 750 | SPDGGI | 1065 | DDTNNDPFDY |
| CXCR5-1-89 | 614 | GFTFSSY | 751 | SYSGSE | 1066 | GEGHYYDSTRQRFYFYFPMDV |
| CXCR5-1-90 | 615 | GFTFSDY | 752 | SPSGSN | 1067 | RRYRFGFWRQHHAYTFDV |
| CXCR5-1-91 | 616 | GGTFSNY | 753 | RPGNGE | 1068 | SYLSSYDLYAMDY |
| CXCR5-1-92 | 617 | GFTFSNY | 754 | SPSGSE | 1069 | DKDSNGILHGQNFDY |
| CXCR5-1-93 | 618 | GGTFSNY | 755 | RPGDGY | 1070 | GYNWARKLVY |
| CXCR5-1-94 | 619 | GFTFSSY | 756 | SYDGSE | 1071 | GKSGWYPLHGQNFDY |
| CXCR5-1-95 | 620 | GGTFSSY | 757 | RPNNGY | 1072 | HFIYYGGFSTGFDY |
| CXCR5-1-96 | 621 | GFTFSSY | 758 | SPNGGE | 1073 | GDQDNGGRLGYYFDY |
| CXCR5-1-97 | 622 | GFTFSNY | 759 | SYSGGI | 1074 | DRTNYFPFDY |
| CXCR5-1-98 | 623 | GFTFSDY | 760 | SPSGGI | 1075 | ISHYVGLWRHYYYRGFDV |
| CXCR5-1-99 | 624 | GGTFSDY | 761 | RPNNGE | 1076 | LTSRSTDGQFAFDY |
| CXCR5-1-100 | 625 | GFTFSDY | 762 | SYSGSN | 1077 | ISVYFDLWGYYHYYGLDY |
| CXCR5-1-101 | 626 | GGTFSSY | 763 | RPNDGE | 1078 | LTFRFTNGYGGFDY |
| CXCR5-1-102 | 627 | GFTFSNY | 764 | SPSGSI | 1079 | GRGYYYIGTGHRGHKHRPMDV |
| CXCR5-1-103 | 628 | GFTFSDY | 765 | SPNGGI | 1080 | DTDSRLPYHRQPFDY |
| CXCR5-1-104 | 629 | GGTFSNY | 766 | RPNNGY | 1081 | LYYSSYNLAAMDY |
| CXCR5-1-105 | 630 | GGTFSSY | 767 | NPGDGY | 1082 | FYYYFDKLVY |
| CXCR5-1-106 | 631 | GFTFSSY | 768 | AYITYYP | 1083 | GDDGNFPFDY |
| CXCR5-1-107 | 632 | GGTFSSY | 769 | RPN | 1084 | PGEYMDYEITYAPFQFAY |
| CXCR5-1-108 | 633 | GGTFSDY | 770 | RPGDGY | 1085 | FGHSGRSFAY |
| CXCR5-1-109 | 634 | GGTFSNY | 771 | NPGNGE | 1086 | DPIDSYYFAYGFDY |
| CXCR5-1-110 | 635 | GGTFSDY | 772 | NPNDGE | 1087 | HGAPMSVSYTSHPFQMDY |
| CXCR5-1-111 | 636 | GGTFSDY | 773 | RPGNGY | 1088 | FYYYGAWLDY |
| CXCR5-1-112 | 637 | GFTFSSY | 774 | SYDGSE | 1089 | PSHYYDLWTQYYAYGLDY |
| CXCR5-1-113 | 638 | GGTFSNY | 775 | RPNNGE | 1090 | HTISYGYSQTWFDY |
| CXCR5-1-114 | 639 | GGTFSNY | 776 | NPYDGY | 1091 | LTGYFDVFAYGFDY |
| CXCR5-1-115 | 640 | GFT | 777 | SYDGGSI | 1092 | DRGYYYDGTTYNFGKGFPMDV |
| CXCR5-1-116 | 641 | GGTFSDY | 778 | NPYDGY | 1093 | LSFGNDYFQYAFDY |
| CXCR5-1-117 | 642 | GFTFSSY | 779 | SPDGSN | 1094 | KRHYDIFYGQRGARTFDV |
| CXCR5-1-118 | 643 | GFTFSSY | 780 | SPNGGI | 1095 | DKSDYGIYWTQGFDY |
| CXCR5-1-119 | 644 | GGTFSSY | 781 | RPNNGY | 1096 | SFSSNGGYSGAFAY |
| CXCR5-1-120 | 645 | GFTFSDY | 782 | SYDGGE | 1097 | HLDYGYGFDY |
| CXCR5-1-121 | 646 | GFTFSSY | 783 | SYNGGN | 1098 | DRDNYYSSTGQYFHKGRPMDV |
| CXCR5-1-122 | 647 | GFTFSNY | 784 | SYSGSE | 1099 | GTDSYGDFYTFNFDY |
| CXCR5-1-123 | 648 | GFTFSNY | 785 | SYSGGN | 1100 | PDVRDILWRYYYYRGMDY |
| CXCR5-1-124 | 649 | GFTFSNY | 786 | SYDGSN | 1101 | DEGHYYDFYTHDGGYYGGMDV |
| CXCR5-1-125 | 650 | GFTFSDY | 787 | SYDGGI | 1102 | GEDYRYSFYGYYYYKYFPMDV |
| CXCR5-1-126 | 651 | GFTFSSY | 788 | | 1103 | ATSRWGPYYRQGFDY |
| CXCR5-1-127 | 652 | GFTFSNY | 789 | SPSGGE | 1104 | PRGLYSVYTNDHARGLDY |
| CXCR5-1-128 | 653 | GFTFSSY | 790 | SYNGGN | 1105 | GDDNNYAFDY |
| CXCR5-1-129 | 654 | GFTFSNY | 791 | SYSGGN | 1106 | DDRNGFPFDY |
| CXCR5-1-130 | 655 | GFTFSSY | 792 | SPNGGN | 1107 | GLHNWYAFDY |
| CXCR5-1-131 | 656 | GFTFSNY | 793 | SYSGGI | 1108 | IRDNYFPFDY |
| CXCR5-1-132 | 657 | GFTFSNY | 794 | SYDGSN | 1109 | IRHLFGFSTQDHARGFDV |
| CXCR5-1-133 | 658 | GFTFSDY | 795 | SYNGGN | 1110 | DELYRGSGWGYYGYYGYPMDV |
| CXCR5-1-134 | 659 | GFTFSNY | 796 | SPNGGI | 1111 | HDDNNFGFDY |
| CXCR5-1-135 | 660 | GGTFSSY | 797 | RPGNGE | 1112 | GYSYAAYLDY |
| CXCR5-1-136 | 661 | GFTFSNY | 798 | SPSGGI | 1113 | IRHGNYAFDY |
| CXCR5-1-137 | 662 | GFTFSNY | 799 | SYNGGI | 1114 | GRRGNDPFDY |
| CXCR5-1-138 | 663 | GGTFSSY | 800 | NPNDGY | 1115 | LFISYDDFNTAFDY |
| CXCR5-1-139 | 664 | GFTFSDY | 801 | SYDGSN | 1116 | GTQRRTDLHTYPFDY |
| CXCR5-1-140 | 665 | GFTFSSY | 802 | SPSGSE | 1117 | DPSRWTGWYRYPFDY |
| CXCR5-1-141 | 666 | GFTFSDY | 803 | SPSGSE | 1118 | IDRDYFAFDY |
| CXCR5-1-142 | 667 | GGTFSNY | 804 | RPNDGE | 1119 | STSYYYNYATWFAY |
| CXCR5-1-143 | 668 | GGTFSSY | 805 | RPNNGY | 1120 | DYYWYFVYSAIDY |
| CXCR5-1-144 | 669 | GFTFSSY | 806 | SPDGGE | 1121 | DRDDRGILWTYNFDY |
| CXCR5-1-145 | 670 | GFTFSDY | 807 | SYDGGI | 1122 | IFVLFSLTGQNYYRTLDY |
| CXCR5-1-146 | 671 | GFTFSNY | 808 | SYDGGN | 1123 | DDSDWTSLLRFNFDY |
| CXCR5-1-147 | 672 | GFTFSNY | 809 | SYDGSN | 1124 | HDRDGYAFDY |
| CXCR5-1-148 | 673 | GGTFSNY | 810 | RPGNGY | 1125 | LTSRFYNFQYYFAY |
| CXCR5-1-149 | 674 | GFTFSDY | 811 | SYSGSN | 1126 | GELYYYSGSYYDYGYYYGMDV |
| CXCR5-1-150 | 675 | GGTFSSY | 812 | RPNDGE | 1127 | DEYSYTYGYYMDY |
| CXCR5-1-151 | 676 | GFTFSSY | 813 | SYSGSN | 1128 | HLHDNFAFDY |
| CXCR5-1-152 | 677 | GFTFSSY | 814 | SPDGGI | 1129 | RVVLFDLTGYDYAYTFDY |
| CXCR5-1-153 | 678 | GFTFSSY | 815 | SYDGGN | 1130 | GEDNRYISSGYDYYYHGPMDV |
| CXCR5-1-154 | 679 | GGTFSNY | 816 | RPNNGE | 1131 | HSRPYDTSYTYFGFAMDY |
| CXCR5-1-155 | 680 | GGTFSNY | 817 | RLNNGY | 1132 | LPFGSGYSSTAFDY |
| CXCR5-1-156 | 681 | GGTFSSY | 818 | RPNDGY | 1133 | HSEPSDVSITSFPYTFDY |
| CXCR5-1-157 | 682 | GGTFSSY | 819 | NPNDGY | 1134 | HGSPNTYYYYMDY |
| CXCR5-1-158 | 683 | GGTFSNY | 820 | RPNNGE | 1135 | GYGSGAAFDY |
| CXCR5-1-159 | 684 | GFTFSDY | 821 | SPSGSE | 1136 | DEDHYYIFWGHNYHYHRPMDV |
| CXCR5-1-160 | 685 | GGTFSNY | 822 | NPGDGY | 1137 | DYSWHDYLNYMDY |
| CXCR5-1-161 | 686 | GFTFSNY | 823 | SPNGGN | 1138 | DEGHYYSGWTFNHHKYGGMDV |
| CXCR5-1-162 | 687 | GFTFSNY | 824 | SYSGGN | 1139 | IDVWDSFWGYDHARGLDV |
| CXCR5-1-163 | 688 | GGTFSDY | 825 | RPGDGE | 1140 | HFGRFTVFQGGFAY |
| CXCR5-1-164 | 689 | GGTFSDY | 826 | NPGDGY | 1141 | LYSSNFGYSAMDY |
| CXCR5-1-165 | 690 | GFTFSSY | 827 | SYNGGE | 1142 | DEGHRGDSLRFDFHKHFPMDV |
| CXCR5-2-1 | 691 | GSTISDR | 828 | IGDA | 1143 | ALQYCSPTSCYVDDYFYYMDV |
| CXCR5-2-2 | 692 | GFTFSTY | 829 | SGSGSI | 1144 | GPEWTPPGDYFYYMDD |
| CXCR5-2-3 | 693 | GFSLDDY | 830 | GSDGS | 1145 | WFGDYNF |
| CXCR5-2-4 | 694 | GRGFSRY | 831 | TPINWGGRGT | 1146 | DPPG |
| CXCR5-2-5 | 695 | GNIAAIN | 832 | SWSSGS | 1147 | DRGGL |
| CXCR5-2-6 | 696 | DLSFSFY | 833 | NWSGT | 1148 | EDDYYDGTGYYQYYGMDV |
| CXCR5-2-7 | 697 | GFTVSNY | 834 | RWSGGI | 1149 | DRGGS |
| CXCR5-2-8 | 698 | GFTLDYY | 835 | NWSGDT | 1150 | EGCSSTSCYLDP |
| CXCR5-2-9 | 699 | GFTFSTY | 836 | SGSGSI | 1151 | TLSPYAMDV |
| CXCR5-2-10 | 700 | GFSFDDDY | 837 | DWNGNS | 1152 | GPEWTPPGDYFYYMDD |
| CXCR5-2-11 | 701 | GGTFSIY | 838 | STHSI | 1153 | YLEMSPGEYFDN |
| CXCR5-2-12 | 702 | GFTFSTY | 839 | SGSGSI | 1154 | YWRTGDWFDP |
| CXCR5-2-13 | 703 | GITFRRY | 840 | SSSGAL | 1155 | DRTGSGWFRDV |
| CXCR5-2-14 | 526 | GIPSIR | 841 | SRSGET | 1156 | SGLDDGYYPED |
| CXCR5-2-15 | 527 | GSIDSIH | 842 | SWTGGS | 1157 | DPPG |
| CXCR5-2-16 | 528 | GSTISDR | 843 | IGDA | 1158 | DMGG |
| CXCR5-2-17 | 529 | GMTTIG | 844 | SWSGGL | 1159 | VYYDSSGYNDY |
| CXCR5-2-18 | 530 | GSTISDR | 845 | IGDA | 1160 | GPEWTPPGDYFYYMDD |
| CXCR5-2-19 | 531 | GSIDSIH | 846 | SWTGGS | 1161 | GMVRGVDF |
| CXCR5-2-20 | 532 | GRTFSDY | 847 | NWNGDS | 1162 | LFAQYSDYDYVAE |
| CXCR5-2-21 | 533 | GRTFFSY | 848 | RWSGGS | 1163 | GRPVPR |
| CXCR5-2-22 | 534 | GNIFRIE | 849 | HSSGS | 1164 | SDYDVVSGLTNDYLYYLDD |
| CXCR5-2-23 | 535 | GFNFDDY | 850 | SSGGN | 1165 | TSYYYSSGSSFSGRLDYLDD |
| CXCR5-2-24 | 536 | GFPFSEY | 851 | AWGDGI | 1166 | IFVGMDV |
| CXCR5-2-25 | 537 | GFPFDDY | 852 | TRSGKT | 1167 | VYYDSSGYNDY |
| CXCR5-2-26 | 538 | GFPFDDY | 853 | SWSAGS | 978 | VRDFWGGYDIDH |
| CXCR5-2-27 | 539 | GFNLDDYA | 854 | TWSGGL | 979 | DRGGS |
| CXCR5-2-28 | 540 | GFGID | 855 | SWSGDS | 980 | AGGPYYDLSTGSSGHLDY |
| CXCR5-2-29 | 541 | GFDFDNFDDY | 856 | NRSGDT | 981 | AGPNYYDSDTRGDY |
| CXCR5-2-30 | 542 | GFNFDDY | 857 | STDVDS | 982 | AEGYWYFDL |
| CXCR5-2-31 | 543 | GFGFGSY | 858 | TSSDGR | 983 | APYTSVAGRAYYYYYGMDV |
| CXCR5-2-32 | 544 | GFDFDNFDDY | 859 | NRSGDT | 984 | WFGDYNF |
| CXCR5-2-33 | 545 | GFPFSIW | 860 | RWSGAS | 985 | LDILGGPDTVGAFDL |
| CXCR5-2-34 | 546 | GFPFSEY | 861 | AWGDGI | 986 | DMGG |
| CXCR5-2-35 | 547 | GFSFDDY | 862 | RWSGGI | 987 | VARDRGYNYDSD |
| CXCR5-2-36 | 548 | GFPLDDY | 863 | AWGDGS | 988 | TFKTGYRSGYY |
| CXCR5-2-37 | 549 | GFPLDDY | 864 | SSEGT | 989 | DQSAYGQTVFFDS |
| CXCR5-2-38 | 550 | GFPLDYY | 865 | SRSGGS | 990 | DPDDYGDYTFDY |
| CXCR5-2-39 | 551 | GFSFDDDY | 866 | SRSGGD | 991 | GMVRGVDF |
| CXCR5-2-40 | 552 | GFSFDDDY | 867 | DWNGNS | 992 | WIHMKGGFLDY |
| CXCR5-2-41 | 553 | GFSFDDDY | 868 | DWNGNS | 993 | ADCSGGVCNAY |
| CXCR5-2-42 | 554 | GFAFSRY | 869 | TPGGN | 994 | TSWGLVY |
| CXCR5-2-43 | 555 | GFSFDDY | 870 | SFGGN | 995 | TSYYYSSGSSFSGRLDYLDD |
| CXCR5-2-44 | 556 | GFSLDDY | 871 | GSDGS | 996 | ALQYCSPTSCYVDDYFYYMDV |
| CXCR5-2-45 | 557 | GFSLDDY | 872 | GSDGS | 997 | GFSSGWYGWDS |
| CXCR5-2-46 | 558 | GFSLDDY | 873 | SRSGNV | 998 | WFGDYNF |
| CXCR5-2-47 | 559 | GFSLDDY | 874 | AWSSDF | 999 | ASPGRYCSGRSCYFDWYFHL |
| CXCR5-2-48 | 560 | GFSLDYY | 875 | SWIIGS | 1000 | ALQYCSPTSCYVDDYFYYMDV |
| CXCR5-2-49 | 561 | GFSLDYY | 876 | SWIIGS | 1001 | VNPSDYYDSRGYPDY |
| CXCR5-2-50 | 562 | GFAFSTA | 877 | TRGS | 1002 | TLSPYAMDV |
| CXCR5-2-51 | 563 | GDTFNWY | 878 | TADGI | 1003 | DREAYSYGYNDY |
| CXCR5-2-52 | 564 | GFAFDDY | 879 | RWSGGI | 1004 | EETLQQLLRAYC |
| CXCR5-2-53 | 565 | GFTDDYY | 880 | SWSGGS | 1005 | GPYGGASYFTV |
| CXCR5-2-54 | 566 | GFTFENY | 881 | NWNGAS | 1006 | DHPNYYYGMDV |
| CXCR5-2-55 | 567 | GFTFSTH | 882 | YPSG | 1007 | EGPRVDLNYDFWSPDYYYYMDV |
| CXCR5-2-56 | 568 | DLSFSFY | 883 | TSGGI | 1008 | EDDYYDGTGYYQYYGMDV |
| CXCR5-2-57 | 569 | GRGFSRY | 884 | TPINWGGRGT | 1009 | EDDYYDGTGYYQYYGMDV |
| CXCR5-2-58 | 570 | GSTFSKA | 885 | SSSGIS | 1010 | GGGPHYYYYYYMDV |
| CXCR5-2-59 | 571 | GSTFSSY | 886 | NYSGGS | 1011 | EGEYSSSWYYYYYGMDV |
| CXCR5-2-60 | 572 | GYFASWY | 887 | SRGGMTSLGDS | 1012 | DRPDYYYYYGMDV |
| CXCR5-2-61 | 573 | GCTVSIN | 888 | SWSGGS | 1013 | LFAQYSDYDYVAE |
| CXCR5-2-62 | 574 | GDIFSNY | 889 | GSDGS | 1014 | AVGATSDDPFDM |
| CXCR5-2-63 | 575 | GDIGSIN | 890 | RWSGGI | 1015 | SGGNYGDYVV |
| CXCR5-2-64 | 576 | GDIGSIN | 891 | TPINWGGRGT | 1016 | RGSGVATRVY |
| CXCR5-2-65 | 577 | GDIGSIN | 892 | RWSGGI | 1017 | TRHDYSNVY |
| CXCR5-2-66 | 578 | GDIGSIN | 893 | SRSGGT | 1018 | VTSGADAFDI |
| CXCR5-2-67 | 579 | GDISSIV | 894 | RWSEDR | 1019 | DQGREDDFWSGYDEPRDV |
| CXCR5-2-68 | 580 | GDISSIV | 895 | RWSEDR | 1020 | TFKTGYRSGYY |
| CXCR5-2-69 | 581 | GDTFNWY | 896 | DWSGSS | 1021 | LEFNYYDSRQLR |
| CXCR5-2-70 | 582 | GDTFNWY | 897 | SRSGDT | 1022 | ASSDYGDVSGP |
| CXCR5-2-71 | 583 | GDTFNWY | 898 | SRSGDT | 1023 | TGSSSPDSYMDV |
| CXCR5-2-72 | 584 | GDTFNWY | 899 | SRSGSI | 1024 | DVGNNWYADS |
| CXCR5-2-73 | 585 | GDTFNWY | 900 | SWSEDN | 1025 | AAQDYGDSTFDF |
| CXCR5-2-74 | 586 | GDTFNWY | 901 | TNGGS | 1026 | CSGGSCNY |
| CXCR5-2-75 | 587 | GDTFSSY | 902 | TWSGGI | 1027 | DLYYDSSGYYGG |
| CXCR5-2-76 | 588 | GDTFSWY | 903 | SNSGLS | 1028 | AYCSGGSCYDY |
| CXCR5-2-77 | 589 | GDTFSWY | 904 | SRSGGT | 1029 | VMESGYDYLDY |
| CXCR5-2-78 | 590 | GDTFSWY | 905 | SSSGEV | 1030 | IVLVAVGELTDY |
| CXCR5-2-79 | 591 | GERAFSNY | 906 | TSGGT | 1031 | GPEWTPPGDYFYYMDD |
| CXCR5-2-80 | 592 | GFSLDYY | 907 | DWSGGT | 1032 | GPEWTPPGDYFYYMDD |
| CXCR5-2-81 | 593 | GFTFSTY | 908 | SGSGSI | 1033 | DWQSLVRGVSIDQ |
| CXCR5-2-82 | 594 | GFTDDYY | 909 | DTSGI | 1034 | GQLRYFDWLLDYYFDY |
| CXCR5-2-83 | 595 | GFTFSSY | 910 | SSSGVT | 1035 | DPPG |
| CXCR5-2-84 | 596 | GFTFSTS | 911 | SMSGDD | 1036 | GNYYMDV |
| CXCR5-2-85 | 597 | GFTFSTY | 912 | NWDSAR | 1037 | DQH |
| CXCR5-2-86 | 598 | GFTFSTY | 913 | SGGGSI | 1038 | GPEWTPPGDYFYYMDD |
| CXCR5-2-87 | 599 | GFTFSTY | 914 | SGSGA | 1039 | GPEWTPPGDYFYYMDV |
| CXCR5-2-88 | 600 | GFTFSTY | 915 | SGSGSI | 1040 | GSYGGYV |
| CXCR5-2-89 | 601 | GFTFSTY | 916 | SGSGSI | 1041 | QYCAAGSCYDK |
| CXCR5-2-90 | 602 | GFTFSTY | 917 | SGSGSI | 1042 | AERGSERAY |
| CXCR5-2-91 | 603 | GFTFSTY | 918 | SGSGSI | 1043 | AGPNYYDSDTRGDY |
| CXCR5-2-92 | 604 | GFTFSTY | 919 | SGSGSI | 1044 | DGDFWSGYRDY |
| CXCR5-2-93 | 605 | GSIYSLD | 920 | SRSGSI | 1045 | DHYVWGTFDP |
| CXCR5-2-94 | 606 | GFTFSTY | 921 | SGSGSI | 1046 | GPYGGASYFTV |
| CXCR5-2-95 | 607 | GFTFSTY | 922 | SGSGSI | 1047 | GVGYCGGMGCHEGDY |
| CXCR5-2-96 | 608 | GFTFSTY | 923 | SGSGSI | 1048 | PYCSSTSCYSS |
| CXCR5-2-97 | 609 | GFTFSTY | 924 | SGSGSI | 1049 | QMCGGGDCYIH |
| CXCR5-2-98 | 610 | GFTFSTY | 925 | SGSGSI | 1050 | VYYDSSGYYDY |
| CXCR5-2-99 | 611 | GFTFSTY | 926 | SGSGSI | 1051 | LWAGYDGDYFNY |
| CXCR5-2-100 | 612 | GFTFSTY | 927 | SGSGSI | 1052 | SKLVGSTYVDY |
| CXCR5-2-101 | 613 | GFTFSTY | 928 | SGSGSI | 1053 | WMGTYGDDY |
| CXCR5-2-102 | 614 | GFTFSTY | 929 | SSSGGS | 1054 | AGYEDY |
| CXCR5-2-103 | 615 | GFTFSTY | 930 | SSSGGS | 1055 | GPEWTPPGDYFYYMDD |
| CXCR5-2-104 | 616 | GFTFSTY | 931 | YSDGS | 1056 | VESEDLLVDSLIY |
| CXCR5-2-105 | 617 | GFTFSTY | 932 | NWNGDS | 1057 | GPEWTPPGDYFYYMDD |
| CXCR5-2-106 | 618 | GFTIDDY | 933 | NSDGT | 1058 | VVYGSDSFDDF |
| CXCR5-2-107 | 619 | GFTLDAY | 934 | NSGGS | 1059 | AYDFWSGPVY |
| CXCR5-2-108 | 620 | GFTLDAY | 935 | NSGGS | 1060 | PNLRYTYGYDY |
| CXCR5-2-109 | 621 | GFTLDAY | 936 | SKSDGS | 1061 | VYYDSSGYNDY |
| CXCR5-2-110 | 622 | GFTLDAY | 937 | SRSGN | 1062 | NRLTGDSSQVF |
| CXCR5-2-111 | 623 | GFTFSSY | 938 | SSSGVT | 1063 | DQSAYGQTVFFDS |
| CXCR5-2-112 | 624 | GFTFSSY | 939 | SSSGVT | 1064 | GPYYYDSSGYYGPNDY |
| CXCR5-2-113 | 625 | GFTDDYY | 940 | SWSGSN | 1065 | ALQYCSPTSCYVDDYFYYMDV |
| CXCR5-2-114 | 626 | GFTDGID | 941 | SWSGGI | 1066 | AGDTRNDYNYGAY |
| CXCR5-2-115 | 627 | GFTFDDT | 942 | GSDGS | 1067 | GAQWEQRTYDS |
| CXCR5-2-116 | 628 | GFTFDDY | 943 | SSSDGS | 1068 | ALDGYSGS |
| CXCR5-2-117 | 629 | GFTFDDY | 944 | RWSDGT | 1069 | LVVPANTYFYYAMDV |
| CXCR5-2-118 | 630 | GFTFDDY | 945 | RWSDGT | 1070 | DGADTAPIYGMAV |
| CXCR5-2-119 | 631 | GFTFDDY | 946 | SRSPGV | 1071 | EPGPADYRDY |
| CXCR5-2-120 | 632 | GFTFDDY | 947 | STGGDT | 1072 | DLSGRGDVSEYEYD |
| CXCR5-2-121 | 633 | GFTFDDY | 948 | SSSDKD | 1073 | VANDYGNYEPS |
| CXCR5-2-122 | 634 | GFTFDGY | 949 | SWDGRN | 1074 | AGDTRNDYNYGAY |
| CXCR5-2-123 | 635 | GFTFDRS | 950 | GSDGT | 1075 | DYYDSSGYYYV |
| CXCR5-2-124 | 636 | GFTFDRSY | 951 | NWSLTR | 1076 | GTFDVLRFLEWRL |
| CXCR5-2-125 | 637 | GFTFDYY | 952 | SWNGGS | 1077 | YYDSSGYSQDFDY |
| CXCR5-2-126 | 638 | GFTFEDY | 953 | SGSGSI | 1078 | GPEWTPPGDYFYYMDD |
| CXCR5-2-127 | 639 | GFTFEDY | 954 | SSSGIS | 1079 | EGCSSTSCYLDP |
| CXCR5-2-128 | 640 | GFTFEDY | 955 | SSGGT | 1080 | TSYYGDFE |
| CXCR5-2-129 | 641 | GFTFGHY | 956 | NRSGDT | 1081 | GPEWTPPGDYFYYMDD |
| CXCR5-2-130 | 642 | GFTFRRY | 957 | RWSGGI | 1082 | GPEWTPPGDYFYYMDD |
| CXCR5-2-131 | 643 | GFTFRRY | 958 | RWSGGI | 1083 | GRSRGTSGTTAD |
| CXCR5-2-132 | 644 | GFTFRSY | 959 | SGSDGS | 1084 | ASSDYGDVSGP |
| CXCR5-2-133 | 645 | GFTFSDY | 960 | ASMGGL | 1085 | LFAQYSDYDYVAE |
| CXCR5-2-134 | 646 | GFTFSDY | 961 | ASMGGL | 1086 | SDYDVVSGLTNDYLYYLDD |
| CXCR5-2-135 | 647 | GFTFSEY | 962 | AWSSDF | 1087 | VGLGSCSTTSCFDY |
| CXCR5-2-136 | 648 | GFTFSGN | 963 | RWSGGQI | 1088 | GPTGPPRFFDF |
| CXCR5-2-137 | 649 | GFTFSNY | 964 | TSGGS | 1089 | GASY |
| CXCR5-2-138 | 650 | GFTFSRY | 965 | NYSGGS | 1090 | VGAAGAVF |
| CXCR5-2-139 | 651 | GFTFSSD | 966 | SGTGTI | 1091 | GSGGGVDY |
| CXCR5-2-140 | 652 | GFTFSSDDY | 967 | NWSGKD | 1092 | ANKYYYDYYGVDV |
| CXCR5-2-141 | 653 | GYTYTTY | 968 | YWSGKD | 1093 | GPDMIRSWYAWFDP |
| CXCR5-2-142 | 654 | GNIFINN | 969 | NRSGGA | 1094 | LFGSPSSSADYYYFDL |
| CXCR5-2-143 | 655 | GSIFSIN | 970 | SWSAGS | 1095 | DRCGGDCNFSVLDWFDP |
| CXCR5-2-144 | 656 | GFNFDDY | 971 | SSGGN | 1096 | IISSTTGTDYFQN |
| CXCR5-2-145 | 657 | GRTFSNT | 972 | SWSGDN | 1097 | AGGYDYVWGSYPSDY |
| CXCR5-2-146 | 658 | GRTGTIY | 973 | SWSDGS | 1098 | SDYDVVSGLTNDYLYYLDD |
| CXCR5-2-147 | 659 | GRTPSII | 974 | SSEGT | 1099 | VGEQTEYVDGTGYDYFYAMDV |
| CXCR5-2-148 | 660 | GSIDNIH | 975 | TWSGDS | 1100 | SPGIRGPINH |
| CXCR5-2-149 | 661 | GSIDSIH | 976 | SWTGGS | 1101 | DFDYGDYWERDAFDI |
| CXCR5-2-150 | 662 | GSIDSIH | 977 | SWTGGS | 1102 | GRVGVYGDYLFDH |

TABLE 12
CXCR5 Variable Light Chain CDR's

| | SEQ | | SEQ | | SEQ | |
|---|---|---|---|---|---|---|
| | ID | | ID | | ID | |
| Variant | NO | CDR1 | NO | CDR2 | NO | CDR3 |
| CXCR5-1-1 | 1103 | RSSQSLVHSDGNTYLE | 1268 | KVSNRASG | 1329 | QQSSETPLT |
| CXCR5-1-2 | 1104 | RSSQSLVHSNGNTYLA | 1269 | KASNRASG | 1330 | QQSSSYPFT |
| CXCR5-1-3 | 1105 | RSSQSLVHSDGNTYLA | 1270 | KASNRFSG | 1331 | QQGSETPLT |
| CXCR5-1-4 | 1106 | RSSQSLVHSNGNTYLA | 1271 | KVSNRASG | 1332 | QQGYSTPLT |
| CXCR5-1-5 | 1107 | RSSQSLVHSDGKTYLE | 1272 | KASNRASG | 1333 | FQSSSTPFT |
| CXCR5-1-6 | 1108 | RSSQSLVNSDGKTYLH | 1273 | KASNRASG | 1334 | FQGSEYPFT |
| CXCR5-1-7 | 1109 | RSSQSLVNSDGNTYLE | 1274 | KASNRASG | 1335 | FQGSEYPFT |
| CXCR5-1-8 | 1110 | RSSQSLVHSNGNTYLH | 1275 | KVSNRASG | 1336 | FQSYHYPLT |
| CXCR5-1-9 | 1111 | RSSQSLVNSDGNTYLH | 1276 | KASNRASG | 1337 | QQGSSTPLT |
| CXCR5-1-10 | 1112 | RSSQSLVNSNGKTYLA | 1277 | KASNRFSG | 1338 | QQSSHVPFT |
| CXCR5-1-11 | 1113 | RSSQSLVNSNGKTYLA | 1278 | KASNRFSG | 1339 | QQGYHTPLT |
| CXCR5-1-12 | 1114 | RSSQSLVNSDGKTYLH | 1279 | KVSNRASG | 1340 | QQGYETPFT |
| CXCR5-1-13 | 1115 | RSSQSLVNSDGKTYLE | 1280 | KASNRFSG | 1341 | FQSSSVPLT |
| CXCR5-1-14 | 1116 | RSSQSLVNSNGKTYLA | 1281 | KVSNRASG | 1342 | QQSSEYPFT |
| CXCR5-1-15 | 1117 | RSSQSLVHSNGKTYLH | 1282 | KASNRASG | 1343 | FQGYHTPLT |
| CXCR5-1-16 | 1118 | RSSQSLVNSNGNTYLH | 1283 | KVSNRASG | 1344 | FQGSHYPFT |
| CXCR5-1-17 | 1119 | RSSQSLVHSDGNTYLH | 1284 | KVSNRASG | 1345 | QQGYETPFT |
| CXCR5-1-18 | 1120 | RSSQSLVHSNGKTYLA | 1285 | KASNRASG | 1346 | QQSYHVPFT |
| CXCR5-1-19 | 1121 | RSSQSLVNSDGNTYLH | 1286 | KASNRASG | 1347 | QQSSHTPFT |
| CXCR5-1-20 | 1122 | RSSQSLVNSDGKTYLE | 1287 | KASNRASG | 1348 | FQGSHYPFT |
| CXCR5-1-21 | 1123 | RSSQSLVNSDGNTYLH | 1288 | KVSNRFSG | 1349 | FQGYETPLT |
| CXCR5-1-22 | 1124 | RSSQSLVNSDGNTYLH | 1289 | KASNRASG | 1350 | QQSSHVPFT |
| CXCR5-1-23 | 1125 | RSSQSLVNSDGNTYLE | 1290 | KVSNRFSG | 1351 | FQGYHTPFT |
| CXCR5-1-24 | 1126 | RSSQSLVNSNGKTYLA | 1291 | KVSNRASG | 1352 | QQSYHTPFT |
| CXCR5-1-25 | 1127 | RSSQSLVNSDGNTYLA | 1292 | KASNRASG | 1353 | FQGSSTPLT |
| CXCR5-1-26 | 1128 | RSSQSLVNSNGNTYLH | 1293 | KVSNRFSG | 1354 | FQSYSTPFT |
| CXCR5-1-27 | 1129 | RSSQSLVHSNGNTYLH | 1294 | KASNRFSG | 1355 | QQSYSTPLT |
| CXCR5-1-28 | 1130 | RSSQSLVNSNGKTYLA | 1295 | KASNRASG | 1356 | QQSYEVPLT |
| CXCR5-1-29 | 1131 | RSSQSLVHSNGKTYLH | 1296 | KASNRASG | 1357 | QQSSSYPFT |
| CXCR5-1-30 | 1132 | RSSQSLVHSDGKTYLE | 1297 | KVSNRASG | 1358 | FQGSHYPFT |
| CXCR5-1-31 | 1133 | RSSQSLVNSDGKTYLH | 1298 | KVSNRASG | 1359 | QQGYSTPFT |
| CXCR5-1-32 | 1134 | RSSQSLVHSDGKTYLA | 1299 | KASNRFSG | 1360 | QQSYHVPFT |
| CXCR5-1-33 | 1135 | RSSQSLVHSDGKTYLE | 1300 | KASNRFSG | 1361 | QQSSHYPLT |
| CXCR5-1-34 | 1136 | RSSQSLVNSNGKTYLA | 1301 | KVSNRASG | 1362 | QQGSHVPFT |
| CXCR5-1-35 | 1137 | RSSQSLVNSDGNTYLH | 1302 | KASNRASG | 1363 | QQSSSTPFT |
| CXCR5-1-36 | 1138 | RSSQSLVNSNGNTYLH | 1303 | KASNRASG | 1364 | QQGYHYPLT |
| CXCR5-1-37 | 1139 | RSSQSLVNSNGKTYLA | 1304 | KASNRASG | 1365 | QQGSEYPLT |
| CXCR5-1-38 | 1140 | RSSQSLVHSNGNTYLE | 1305 | KVSNRASG | 1366 | QQGSSVPFT |
| CXCR5-1-39 | 1141 | RSSQSLVNSNGNTYLA | 1306 | KASNRASG | 1367 | FQGYEVPFT |
| CXCR5-1-40 | 1142 | RSSQSLVNSNGNTYLE | 1307 | KVSNRFSG | 1368 | QQSSEYPLT |
| CXCR5-1-41 | 1143 | RSSQSLVHSNGKTYLE | 1308 | KASNRASG | 1369 | FQGSHYPLT |
| CXCR5-1-42 | 1144 | RSSQSLVHSNGNTYLH | 1309 | KVSNRFSG | 1370 | QQSSSYPFT |
| CXCR5-1-43 | 1145 | RSSQSLVHSNGNTYLH | 1310 | KASNRASG | 1371 | FQSYEYPFT |
| CXCR5-1-44 | 1146 | RSSQSLVHSNGKTYLH | 1311 | KASNRASG | 1372 | FQSSSTPFT |
| CXCR5-1-45 | 1147 | RSSQSLVHSDGKTYLH | 1312 | KASNRFSG | 1373 | QQSYHYPFT |
| CXCR5-1-46 | 1148 | RSSQSLVHSDGNTYLA | 1313 | KVSNRASG | 1374 | FQGSHYPFT |
| CXCR5-1-47 | 1149 | RSSQSLVHSNGNTYLA | 1314 | KASNRFSG | 1375 | QQSYSYPLT |
| CXCR5-1-48 | 1150 | RSSQSLVNSNGNTYLA | 1315 | KVSNRASG | 1376 | FQSYHTPLT |
| CXCR5-1-49 | 1151 | RSSQSLVNSDGNTYLA | 1316 | KASNRFSG | 1377 | FQSYEVPLT |
| CXCR5-1-50 | 1152 | RSSQSLVHSDCKTYLA | 1317 | KASNRFSG | 1378 | QQGSEYPFT |
| CXCR5-1-51 | 1153 | RSSQSLVHSDGNTYLE | 1318 | KASNRASG | 1379 | QQSSSVPLT |
| CXCR5-1-52 | 1154 | RSSQSLVNSDGKTYLA | 1319 | KVSNRFSG | 1380 | QQGSHVPFT |
| CXCR5-1-53 | 1155 | RSSQSLVNSDGKTYLE | 1320 | KVSNRASG | 1381 | QQSYSVPLT |
| CXCR5-1-54 | 1156 | RSSQSLVNSNGKTYLA | 1321 | KVSNRFSG | 1382 | QQSYSVPLT |
| CXCR5-1-55 | 1157 | RSSQSLVNSNGNTYLA | 1322 | KVSNRASG | 1383 | FQSSHTPFT |
| CXCR5-1-56 | 1158 | RSSQSLVNSDGNTYLE | 1323 | KASNRASG | 1384 | FQGSSTPLT |
| CXCR5-1-57 | 1159 | RSSQSLVHSNGKTYLA | 1324 | KASNRFSG | 1385 | QQSSSYPFT |
| CXCR5-1-58 | 1160 | RSSQSLVHSDGNTYLA | 1325 | KASNRFSG | 1386 | QQSYEYPFT |
| CXCR5-1-59 | 1161 | RSSQSLVNSDGKTYLA | 1326 | KASNRASG | 1387 | FQSSHTPLT |
| CXCR5-1-60 | 1162 | RSSQSLVNSDGKTYLH | 1327 | KVSNRFSG | 1388 | QQSSETPFT |
| CXCR5-1-61 | 1163 | RSSQSLVNSNGNTYLA | 1328 | KASNRASG | 1389 | FQSYSVPLT |
| CXCR5-1-62 | 1164 | RSSQSLVNSDGKTYLE | 1329 | KASNRFSG | 1390 | FQSYETPLT |
| CXCR5-1-63 | 1165 | RSSQSLVHSNGNTYLA | 1330 | KASNRFSG | 1391 | FQSSSTPFT |
| CXCR5-1-64 | 1166 | RSSQSLVHSNGNTYLH | 1331 | KASNRASG | 1392 | QQSYHYPFT |
| CXCR5-1-65 | 1167 | RSSQSLVHSDGNTYLA | 1332 | KASNRFSG | 1393 | QQESSTPFT |
| CXCR5-1-66 | 1168 | RSSQSLVHSDGKTYLE | 1333 | KASNRFSG | 1394 | QQSYHYPLT |
| CXCR5-1-67 | 1169 | RSSQSLVNSDGKTYLH | 1334 | KASNRASG | 1395 | QQSYHTPLT |
| CXCR5-1-68 | 1170 | RSSQSLVHSDGNTYLA | 1335 | KVSNRASG | 1396 | QQSYEYPFT |
| CXCR5-1-69 | 1171 | RSSQSLVHSDGKTYLH | 1336 | KVSNRFSG | 1397 | QQGSSTPLT |
| CXCR5-1-70 | 1172 | RSSQSLVHSNGKTYLH | 1337 | KVSNRFSG | 1398 | QQGSSIPLT |
| CXCR5-1-71 | 1173 | RSSQSLVHSDGKTYLA | 1338 | KASNRASG | 1399 | FQSSSTPLT |
| CXCR5-1-72 | 1174 | RSSQSLVHSDGKTYLH | 1339 | KVSNRASG | 1400 | QQSYHYPLT |
| CXCR5-1-73 | 1175 | RSSQSLVNSDGNTYLA | 1340 | KASNRFSG | 1401 | FQGYETPLT |
| CXCR5-1-74 | 1176 | RSSQSLVHSNGNTYLA | 1341 | KVSNRASG | 1402 | QQGYHTPLT |
| CXCR5-1-75 | 1177 | RSSQSLVHSDGNTYLH | 1342 | KASNRASG | 1403 | QQSSHVPFT |
| CXCR5-1-76 | 1178 | RSSQSLVNSDGKTYLA | 1343 | KASNRFSG | 1404 | QQGYSYPLT |
| CXCR5-1-77 | 1179 | RSSQSLVNSNGNTYLE | 1344 | KVSNRFSG | 1405 | QQGSHVPFT |
| CXCR5-1-78 | 1180 | RSSQSLVNSNGKTYLA | 1345 | KVSNRFSG | 1406 | QQGYSVPLT |
| CXCR5-1-79 | 1181 | RSSQSLVHSNGKTYLE | 1346 | KVSNRASG | 1407 | FQSYSVPFT |
| CXCR5-1-80 | 1182 | RSSQSLVHSDGNTYLA | 1347 | KVSNRASG | 1408 | FQSYSYPLT |
| CXCR5-1-81 | 1183 | RSSQSLVNSNGKTYLA | 1348 | KASNRFSG | 1409 | QQSYHYPLT |
| CXCR5-1-82 | 1184 | RSSQSLVNSNSNTYLE | 1349 | KASNRFSG | 1410 | QQSSHVPFT |
| CXCR5-1-83 | 1185 | RSSQSLVNSNGNTYLH | 1350 | KVSNRASG | 1411 | QQGSHVPFT |
| CXCR5-1-84 | 1186 | RSSQSLVHSNGKTYLH | 1351 | KASNRASG | 1412 | QQGYHVPFT |
| CXCR5-1-85 | 1187 | RSSQSLVNSDGNTYLE | 1352 | KASNRASG | 1413 | QQSYHVPFT |
| CXCR5-1-86 | 1188 | RSSQSLVNSDGNTYLH | 1353 | KVSNRASG | 1414 | QQGYEYPFT |
| CXCR5-1-87 | 1189 | RSSQSLVHSNGKTYLA | 1354 | KASNRFSG | 1415 | QQSYSYALT |
| CXCR5-1-88 | 1190 | RSSQSLVNSDGKTYLH | 1355 | KASNRASG | 1416 | QQGSEVPFT |
| CXCR5-1-89 | 1191 | RSSQSLVHSDGKTYLA | 1356 | KVSNRASG | 1417 | QQSYSVPFT |
| CXCR5-1-90 | 1192 | RSSQSLVHSDGKTYLH | 1357 | KVSNRFSG | 1418 | FQGYSYPFT |
| CXCR5-1-91 | 1193 | RSSQSLVHSDGNTYLA | 1358 | KVSNRASG | 1419 | QQGSSYPLT |
| CXCR5-1-92 | 1194 | RSSQSLVNSDGNTYLH | 1359 | KVSNRFSG | 1420 | QQSYHTPFT |
| CXCR5-1-93 | 1195 | RSSQSLVNSNGNTYLH | 1360 | KASNRASG | 1421 | QQGYEYPLT |
| CXCR5-1-94 | 1196 | RSSQSLVHSDGNTYLA | 1361 | KVSNRASG | 1422 | QQSYSYPLT |
| CXCR5-1-95 | 1197 | RSSQSLVHSNGNTYLH | 1362 | KASNRASG | 1423 | QQGSEYPFT |
| CXCR5-1-96 | 1198 | RSSQSLVHSNGKTYLE | 1363 | KASNRASG | 1424 | FQSSSTPFT |
| CXCR5-1-97 | 1199 | RSSQSLVHSDGKTYLA | 1364 | KVSNRFSG | 1425 | QQSYSYPLT |
| CXCR5-1-98 | 1200 | RSSQSLVHSDGNTYLE | 1365 | KVSNRASG | 1426 | QQGYSVPFT |
| CXCR5-1-99 | 1201 | RSSQSLVNSDGKTYLE | 1366 | KASNRFSG | 1427 | QQSYSVPFT |
| CXCR5-1-100 | 1202 | RSSQSLVHSNGNTYLH | 1367 | KVSNRASG | 1428 | FQSSSYPFT |
| CXCR5-1-101 | 1203 | RSSQSLVNSNGNTYLH | 1368 | KASNRASG | 1429 | QQGYHVPFT |
| CXCR5-1-102 | 1204 | RSSQSLVHSDGNTYLE | 1369 | KVSNRFSG | 1430 | QQSYSTPFT |
| CXCR5-1-103 | 1205 | RSSQSLVNSNGKTYLE | 1370 | KVSNRASG | 1431 | QQSYHYPFT |
| CXCR5-1-104 | 1206 | RSSQSLVHSDGNTYLH | 1371 | KVSNRFSG | 1432 | QQSSHYPLT |
| CXCR5-1-105 | 1207 | RSSQSLVHSDGKTYLA | 1268 | KASNRFSG | 1433 | FQGSHTPFT |
| CXCR5-1-106 | 1208 | RSSQSLVHSDGKTYLH | 1269 | KASNRFSG | 1434 | FQGSSVPLT |
| CXCR5-1-107 | 1209 | RSSQSLVNSNGNTYLE | 1270 | KASNRFSG | 1435 | FQSYHVPFT |
| CXCR5-1-108 | 1210 | RSSQSLVHSNGKTYLA | 1271 | KASNRLSG | 1436 | QQSYSTPFT |
| CXCR5-1-109 | 1211 | RSSQSLVNSNGNTYLH | 1272 | KASNRASG | 1437 | QQGSEYPFT |
| CXCR5-1-110 | 1212 | RSSQSLVNSDGKTYLH | 1273 | KVSNRFSG | 1438 | QQSSHVPFT |
| CXCR5-1-111 | 1213 | RSSQSLVNSDGNTYLA | 1274 | KASNRASG | 1439 | QQGYSTPFT |
| CXCR5-1-112 | 1214 | RSSQSLVNSDGNTYLH | 1275 | KASNRASG | 1440 | QQGSEVPLT |
| CXCR5-1-113 | 1215 | RSSQSLVHSNGKTYLA | 1276 | KASNRFSG | 1441 | FQGYSTPLT |
| CXCR5-1-114 | 1216 | RSSQSLVHSNGKTYLH | 1277 | KVSNRASG | 1442 | FQSSEVPFT |
| CXCR5-1-115 | 1217 | RSSQSLVNSDGNTYLE | 1278 | KASNRFSG | 1443 | FQSSSVPLT |
| CXCR5-1-116 | 1218 | RSSQSLVHSDGKTYLH | 1279 | KASNRFSG | 1444 | QQGYSTPLT |
| CXCR5-1-117 | 1219 | RSSQSLVHSNGNTYLA | 1280 | KASNRFSG | 1445 | QQGSEVPLT |
| CXCR5-1-118 | 1220 | RSSQSLVNSDGKTYLH | 1281 | KASNRFSG | 1446 | QQGSHVPLT |
| CXCR5-1-119 | 1221 | RSSQSLVHSNGNTYLH | 1282 | KVSNRFSG | 1447 | QQGYSVPFT |
| CXCR5-1-120 | 1222 | RSSQSLVNSDGKTYLE | 1283 | KVSNRASG | 1448 | FQGYEYPLT |
| CXCR5-1-121 | 1223 | RSSQSLVHSDGNTYLA | 1284 | KASNRASG | 1449 | QQGYHYPLT |
| CXCR5-1-122 | 1224 | RSSQSLVHSDGKTYLA | 1285 | KASNRASG | 1450 | QQGYHVPFT |
| CXCR5-1-123 | 1225 | RSSQSLVNSDGNTYLE | 1286 | KVSNRFSG | 1451 | FQGSSYPFT |
| CXCR5-1-124 | 1226 | RSSQSLVHSDGKTYLE | 1287 | KVSNRASG | 1452 | FQSYHYPLT |
| CXCR5-1-125 | 1227 | RSSQSLVHSDGKTYLA | 1288 | KVSNRFSG | 1453 | QQSSHTPFT |
| CXCR5-1-126 | 1228 | RSSQSLVHSDGKTYLH | 1289 | KASNRASG | 1454 | QQGYEYPFT |
| CXCR5-1-127 | 1229 | RSSQSLVHSNGKTYLA | 1290 | KVSNRFSG | 1455 | QQGYEVPLT |
| CXCR5-1-128 | 1230 | RSSQSLVNSNGKTYLA | 1291 | KASNRFSG | 1456 | QQSYHYPFT |
| CXCR5-1-129 | 1231 | RSSQSLVHSNGNTYLA | 1292 | KASNRFSG | 1457 | QQGYSVPFT |
| CXCR5-1-130 | 1232 | RSSQSLVNSNGKTYLH | 1293 | KVSNRFSG | 1458 | FQSSHTPLT |
| CXCR5-1-131 | 1233 | RSSQSLVHSDGNTYLA | 1294 | KVSNRFSG | 1459 | FQSSSTPLT |
| CXCR5-1-132 | 1234 | RSSQSLVNSDGNTYLA | 1295 | KVSNRFSG | 1460 | FQSSEYPLT |
| CXCR5-1-133 | 1235 | RSSQSLVHSNGKTYLA | 1296 | KASNRFSG | 1461 | FQSYHTPFT |
| CXCR5-1-134 | 1236 | RSSQSLVHSNGNTYLA | 1297 | KVSNRASG | 1462 | QQSYSYPLT |
| CXCR5-1-135 | 1237 | RSSQSLVNSDGKTYLA | 1298 | KASNRASG | 1463 | FQSSHVPFT |
| CXCR5-1-136 | 1238 | RSSQSLVNINGKTYLH | 1299 | KASNRFSG | 1464 | QQGSETPFT |
| CXCR5-1-137 | 1239 | RSSQSLVHSNGNTYLE | 1300 | KASNRASG | 1465 | QQSSSYPFT |
| CXCR5-1-138 | 1240 | RSSQSLVHSNGNTYLH | 1301 | KASNRASG | 1466 | QQGSEYPFT |
| CXCR5-1-139 | 1241 | RSSQSLVNSDGKTYLE | 1302 | KVSNRASG | 1467 | FQGSSYPLT |
| CXCR5-1-140 | 1242 | RSSQSLVNSNGNTYLE | 1303 | KASNRASG | 1468 | FQGSEVPLT |
| CXCR5-1-141 | 1243 | RSSQSLVNSDGNTYLA | 1304 | KASNRASG | 1469 | QQSSEYPLT |
| CXCR5-1-142 | 1244 | RSSQSLVNSNGNTYLH | 1305 | KASNRASG | 1470 | QQSYHTPLT |
| CXCR5-1-143 | 1245 | RSSQSLVHSNGKTYLE | 1306 | KASNRFSG | 1471 | QQGSSYPLT |
| CXCR5-1-144 | 1246 | RSSQSLVHSNGKTYLE | 1307 | KVSNRASG | 1472 | QQSYSVPFT |
| CXCR5-1-145 | 1247 | RSSQSLVHSDGKTYLH | 1308 | KVSNRASG | 1473 | QQSSHYPLT |
| CXCR5-1-146 | 1248 | RSSQSLVHSDGNTYLA | 1309 | KASNRFSG | 1474 | QQGYEVPFT |
| CXCR5-1-147 | 1249 | RSSQSLVHSDGKTYLH | 1310 | KVSNRASG | 1475 | QQGSETPLT |
| CXCR5-1-148 | 1250 | RSSQSLVNSDGKTYLA | 1311 | KASNRASG | 1476 | FQGYNTPFT |
| CXCR5-1-149 | 1251 | RSSQSLVNSNGKTYLE | 1312 | KASNRFSG | 1477 | FQGYETPLT |
| CXCR5-1-150 | 1252 | RSSQSLVNSDGNTYLA | 1313 | KASNRASG | 1478 | FQSSETPFT |
| CXCR5-1-151 | 1253 | RSSQSLVHSNGNTYLH | 1314 | KASNRASG | 1479 | QQSYHYPFT |
| CXCR5-1-152 | 1254 | RSSQSLVHSDGNTYLE | 1315 | KVSNRASG | 1480 | FQSYSVPLT |
| CXCR5-1-153 | 1255 | RSSQSLVNSDGKTYLA | 1316 | KVSNRASG | 1481 | FQSYSVPFT |
| CXCR5-1-154 | 1256 | RSSQSLVNSDGKTYLE | 1317 | KASNRASG | 1482 | FQSYSTPFT |
| CXCR5-1-155 | 1257 | RSSQSLVHSNGKTYLH | 1318 | KASNRASG | 1483 | QQGSSVPLT |
| CXCR5-1-156 | 1258 | RSSQSLVNSNGKTYLA | 1319 | KASNRASG | 1484 | QQGSETPLT |
| CXCR5-1-157 | 1259 | RSSQSLVHSNGKTYLA | 1320 | KASNRASG | 1485 | FQGSEYPLT |
| CXCR5-1-158 | 1260 | RSSQSLVHSDGKTYLH | 1321 | KVSNRFSG | 1486 | FQGSETPLT |
| CXCR5-1-159 | 1261 | RSSQSLVNSNGKTYLA | 1322 | KASNRFSG | 1487 | QQSSEYPFT |
| CXCR5-1-160 | 1262 | RSSQSLVHSNGKTYLE | 1323 | KVSNRFSG | 1488 | QQSYHVPFT |
| CXCR5-1-161 | 1263 | RSSQSLVHSDGKTYLH | 1324 | KASNRFSG | 1489 | QQSSEVPFT |
| CXCR5-1-162 | 1264 | RSSQSLVHSNGNTYLH | 1325 | KASNRASG | 1490 | QQGSHTPLT |
| CXCR5-1-163 | 1265 | RSSQSLVHSNGNTYLA | 1326 | KASNRFSG | 1491 | QQSYSYPFT |
| CXCR5-1-164 | 1266 | RSSQSLVHSNGNTYLH | 1327 | KASNRASG | 1492 | QQSSHYPFT |
| CXCR5-1-165 | 1267 | RSSQSLVNSDGNTYLA | 1328 | KASNRASG | 1493 | FQSSETPFT |

[0245] While preferred embodiments of the present disclosure have been shown and described herein, it will be obvious to those skilled in the art that such embodiments are provided by way of example only. Numerous variations, changes, and substitutions will now occur to those skilled in the art without departing from the disclosure. It should be understood that various alternatives to the embodiments of the disclosure described herein may be employed in practicing the disclosure. It is intended that the following claims define the scope of the disclosure and that methods and structures within the scope of these claims and their equivalents be covered thereby.

1. An antibody or antibody fragment comprising a variable domain, heavy chain region (V_{H}) and a variable domain, light chain region (V_{L}), wherein V_{H} comprises complementarity determining regions CDRH1, CDRH2, and CDRH3, wherein V_{L} comprises complementarity determining regions CDRL1, CDRL2, and CDRL3, and wherein (a) an amino acid sequence of CDRH1 is as set forth in any one of SEQ ID NOs: 526-703 and 1494-1555; (b) an amino acid sequence of CDRH2 is as set forth in any one of SEQ ID NOs: 704-977 and 1556-1558; (c) an amino acid sequence of CDRH3 is as set forth in any one of SEQ ID NOs: 978-1167 and 1559-1650; (d) an amino acid sequence of CDRL1 is as set forth in any one of SEQ ID NOs: 1168-1267 and 1651-1652; (e) an amino acid sequence of CDRL2 is as set forth in any one of SEQ ID NOs: 1268-1371 and 1653; and (f) an amino acid sequence of CDRL3 is as set forth in any one of SEQ ID NOs: 1372-1493 and 1654-1666.

2. The antibody or antibody fragment of claim 1, wherein the antibody is a monoclonal antibody, a polyclonal antibody, a bi-specific antibody, a multispecific antibody, a grafted antibody, a human antibody, a humanized antibody, a synthetic antibody, a chimeric antibody, a camelized antibody, a single-chain Fvs (scFv), a single chain antibody, a Fab fragment, a F(ab′)2 fragment, a Fd fragment, a Fv fragment, a single-domain antibody, an isolated complementarity determining region (CDR), a diabody, a fragment comprised of only a single monomeric variable domain, disulfide-linked Fvs (sdFv), an intrabody, an anti-idiotypic (anti-Id) antibody, or ab antigen-binding fragments thereof.

3. The antibody or antibody fragment of claim 1, wherein the antibody or antibody fragment thereof is chimeric or humanized.

4. The antibody or antibody fragment of claim 1, wherein the antibody or antibody fragment has an EC50 less than about 25 nanomolar in a cAMP assay.

5-6. (canceled)

7. The antibody or antibody fragment of claim 1, wherein the antibody or antibody fragment binds to a chemokine receptor with a K_{D} of less than 100 nM.

8-10. (canceled)

11. The antibody or antibody fragment of claim 1, wherein the antibody or antibody fragment is an agonist of a chemokine receptor.

12. The antibody or antibody fragment of claim 1, wherein the antibody or antibody fragment is an antagonist of a chemokine receptor.

13. The antibody or antibody fragment of claim 1, wherein the antibody or antibody fragment is an allosteric modulator of a chemokine receptor.

14. The antibody or antibody fragment of claim 13, wherein the allosteric modulator of a chemokine receptor is a negative allosteric modulator.

15. The antibody or antibody fragment of claim 11, wherein the chemokine receptor is CXCR4.

16. The antibody or antibody fragment of claim 11, wherein the chemokine receptor is CXCR5.

17. An antibody or antibody fragment comprising a variable domain, heavy chain region (V_{H}) and a variable domain, light chain region (V_{L}), wherein the V_{H} comprises an amino acid sequence at least about 90% identical to a sequence as set forth in any one of SEQ ID NOs: 24-28 or 34-356, and wherein the V_{L} comprises an amino acid sequence at least about 90% identical to a sequence as set forth in any one of SEQ ID NOs: 29-33 or 357-525.

18-23. (canceled)

24. The antibody or antibody fragment of claim 17, wherein the antibody is a monoclonal antibody, a polyclonal antibody, a bi-specific antibody, a multispecific antibody, a grafted antibody, a human antibody, a humanized antibody, a synthetic antibody, a chimeric antibody, a camelized antibody, a single-chain Fvs (scFv), a single chain antibody, a Fab fragment, a F(ab′)2 fragment, a Fd fragment, a Fv fragment, a single-domain antibody, an isolated complementarity determining region (CDR), a diabody, a fragment comprised of only a single monomeric variable domain, disulfide-linked Fvs (sdFv), an intrabody, an anti-idiotypic (anti-Id) antibody, or ab antigen-binding fragments thereof.

25-60. (canceled)

61. A method of treating a disease or disorder comprising administering the antibody or antibody fragment of claim 1.

62. The method of claim 61, wherein the disease or disorder affects homeostasis.

63. The method of claim 61, wherein the disease or disorder characterized by hematopoietic stem cell migration.

64. The method of claim 61, wherein the disease or disorder is a solid cancer or a hematologic cancer.

65. The method of claim 61, wherein the disease or disorder is gastric cancer, breast cancer, colorectal cancer, lung cancer, prostate cancer, hepatocellular carcinoma, leukemia, or lymphoma.

66. (canceled)

67. The method of claim 61, wherein the disease or disorder is caused by a virus.

68-69. (canceled)

70. A nucleic acid composition comprising: a) a first nucleic acid encoding a variable domain, heavy chain region (VH) comprising an amino acid sequence at least about 90% identical to a sequence as set forth in any one of SEQ ID NOs: 24-28 or 34-356; b) a second nucleic acid encoding a variable domain, light chain region (VL) comprising at least about 90% identical to a sequence as set forth in any one of SEQ ID NOs: 29-33 or 357-525; and an excipient.

71-76. (canceled)

77. A nucleic acid composition comprising: a nucleic acid encoding a variable domain, heavy chain region (VH) comprising an amino acid sequence at least about 90% identical to a sequence as set forth in any one of SEQ ID NOs: 24-28 or 34-356; and an excipient.

78-82. (canceled)

The application's sequence listing, which the Patent Office published only in electronic form, follows.

SEQUENCE LISTING (1690 sequences)

SEQ ID NO: 1 - protein, 360 aa, Artificial Sequence [sequence omitted]

SEQ ID NO: 2 - protein, 372 aa, Artificial Sequence [sequence omitted]

SEQ ID NO: 3 - DNA, 62 bp, Artificial Sequence
  Description of Artificial Sequence: Synthetic oligonucleotide
  modified_base (51)..(52): Thymidine-succinyl hexamide CED phosphoramidite
agacaatcaaccatttggggtggacagccttgacctctagacttcggcattttttttttttt

SEQ ID NO: 4 - DNA, 112 bp, Artificial Sequence
  Description of Artificial Sequence: Synthetic polynucleotide
  modified_base (101)..(102): Thymidine-succinyl hexamide CED phosphoramidite
cgggatccttatcgtcatcgtcgtacagatcccgacccatttgctgtccaccagtcatgctagccataccatgatgatgatgatgatgagaaccccgcattttttttttttt

SEQ ID NO: 5 - DNA, 19 bp, Artificial Sequence
  Description of Artificial Sequence: Synthetic primer
atgcggggttctcatcatc

SEQ ID NO: 6 - DNA, 20 bp, Artificial Sequence
  Description of Artificial Sequence: Synthetic primer
cgggatccttatcgtcatcg

SEQ ID NO: 7 - protein, 16 aa, Artificial Sequence
  Description of Artificial Sequence: Synthetic peptide
GSYRKCRGGRRWCYQK

SEQ ID NO: 8 - protein, 16 aa, Artificial Sequence
  Description of Artificial Sequence: Synthetic peptide
GSYRKCRGTRRWCYQK

SEQ ID NO: 9 - protein, 16 aa, Artificial Sequence
  Description of Artificial Sequence: Synthetic peptide
GSYRKCRGGHRWCYQK

SEQ ID NO: 10 - protein, 16 aa, Artificial Sequence
  Description of Artificial Sequence: Synthetic peptide
GSYRKCRGQRRWCYQK

SEQ ID NO: 11 - protein, 16 aa, Artificial Sequence
  Description of Artificial Sequence: Synthetic peptide
GSYKKCRGGRRWCYQK

SEQ ID NO: 12 - protein, 16 aa, Artificial Sequence
  Description of Artificial Sequence: Synthetic peptide
GSYRKCRGGRRWCYAK

SEQ ID NO: 13 - protein, 16 aa, Artificial Sequence
  Description of Artificial Sequence: Synthetic peptide
GSYRKCRGGRRWCYRK

SEQ ID NO: 14 - protein, 16 aa, Artificial Sequence
  Description of Artificial Sequence: Synthetic peptide
GSYRMCRGGRRWCYQK

SEQ ID NO: 15 - protein, 16 aa, Artificial Sequence
  Description of Artificial Sequence: Synthetic peptide
GSYRRCRGGRRWCYQK

SEQ ID NO: 16 - protein, 16 aa, Artificial Sequence
  Description of Artificial Sequence: Synthetic peptide
GSYRKCRGGKRWCYQK

SEQ ID NO: 17 - protein, 16 aa, Artificial Sequence
  Description of Artificial Sequence: Synthetic peptide
GSYRKCRGGRKWCYQK

SEQ ID NO: 18 - protein, 16 aa, Artificial Sequence
  Description of Artificial Sequence: Synthetic peptide
GSYRKCRGMRRWCYQK

SEQ ID NO: 19 - protein, 16 aa, Artificial Sequence
  Description of Artificial Sequence: Synthetic peptide
GSYRKCRGGRRWCYNK

SEQ ID NO: 20 - protein, 16 aa, Artificial Sequence
  Description of Artificial Sequence: Synthetic peptide
GSYRKCRGGRRWCFQK

SEQ ID NO: 21 - protein, 16 aa, Artificial Sequence
  Description of Artificial Sequence: Synthetic peptide
GSYRWCRGGRRWCYQK

SEQ ID NO: 22 - protein, 16 aa, Artificial Sequence
  Description of Artificial Sequence: Synthetic peptide
GSYRKCRGIRRWCYQK

SEQ ID NO: 23 - protein, 16 aa, Artificial Sequence
  Description of Artificial Sequence: Synthetic peptide
GSYRKCKGGRRWCYQK

SEQ ID NO: 24 - protein, 124 aa, Artificial Sequence
  Description of Artificial Sequence: Synthetic polypeptide
EVQLVESGGGLVQAGGSLRLSCAASGRTFSSYAMGWFRQAPGKEREFVAAISWSGGSTYYADSVKGRFTISADNAKNTVYLQMNSLKPEDTAVYYCAAARGYWRWRLGRRYDYWGQGTQVTVSS

SEQ ID NO: 25 - protein, 129 aa, Artificial Sequence
  Description of Artificial Sequence: Synthetic polypeptide
EVQLVESGGGLVQAGGSLRLSCAASGRTFSSYAMGWFRQAPGKEREFVAAISWSGGSTYYADSVKGRFTISADNAKNTVYLQMNSLKPEDTAVYYCGSGGYRKCRGGRRWCYRKGGGSWGQGTQVTVSS

SEQ ID NO: 26 - protein, 118 aa, Artificial Sequence
  Description of Artificial Sequence: Synthetic polypeptide
EVQLVESGGGLVQPGGSLRLSCAASGFTFSDYYMSWVRQAPGKGLEWVGFIRHKANFETTEYSTSVKGRFTISRDDSKNSLYLQMNSLKTEDTAVYYCARDLPGFAYWGQGTLVTVSS

SEQ ID NO: 27 - protein, 124 aa, Artificial Sequence
  Description of Artificial Sequence: Synthetic polypeptide
EVQLVESGGGLVQAGGSLRLSCAASGRTFSSYGMGWFRQAPGKERELVAAINWSGGRTSYADSVKGRFTISADNAKNTVYLQMNSLKPEDTAVYYCATGRGYWRWRLGRAYDYWGQGTQVTVSS

SEQ ID NO: 28 - protein, 125 aa, Artificial Sequence
  Description of Artificial Sequence: Synthetic polypeptide
EVQLLESGGGLVQPGGSLRLSCAASGFTFRSYATSWVRQAPGKGLEWVSTISGSGGSTHYADSVKGRFTISRDNSKNTLYLQMNSLRAEDTAVYYCARGPRRWLLSRARGSFDIWGQGTLVTVSS

SEQ ID NO: 29 - protein, 108 aa, Artificial Sequence
  Description of Artificial Sequence: Synthetic polypeptide
DIQMTQSPSSLSASVGDRVTITCRASQSVTTYLNWYQQKPGKAPKLLIYGSSNLQSGVPSRFSGSGSGTDFTLTISSLQPEDFATYYCQQGYSTPWTFGGGTKVEIKR

SEQ ID NO: 30 - protein, 108 aa, Artificial Sequence; identical to SEQ ID NO: 29
  Description of Artificial Sequence: Synthetic polypeptide

SEQ ID NO: 31 - protein, 112 aa, Artificial Sequence
  Description of Artificial Sequence: Synthetic polypeptide
DIVMTQSPDSLAVSLGERATINCKSSQSLFNSHTRKNYLAWYQQKPGQPPKLLIYWASARGSGVPDRFSGSGSGTDFTLTISSLQAEDVAVYYCKQSFNLRTFGGGTKVEIK

SEQ ID NO: 32 - protein, 107 aa, Artificial Sequence
  Description of Artificial Sequence: Synthetic polypeptide
DIQMTQSPSSLSASVGDRVTITCRASQNIASYLNWYQQKPGKAPKLLIYAASTLQGGVPSRFSGSGSGTDFTLTISSLQPEDFATYYCQQSYSLPYTFGGGTKVEIK

SEQ ID NO: 33 - protein, 107 aa, Artificial Sequence
  Description of Artificial Sequence: Synthetic polypeptide
DIQMTQSPSSLSASVGDRVTITCRASQSIGGYLNWYQQKPGKAPKLLIYAASRLQSGVPSRFSGSGSGTDFTLTISSLQPEDFATYYCQQSHSFPRTFGGGTKVEIK

SEQ ID NO: 34 - protein, 127 aa, Artificial Sequence
  Description of Artificial Sequence: Synthetic polypeptide
EVQLVESGGGLVQPGGSLRLSCAASGFTFSDYWMHWVRQAPGKGLEWVSVISPDGSITYYPDSVKGRFTISRDNSKNTLYLQMNSLRAEDTAVYYCARKDVWVIFSTHDGAYGFDVWGQGTLVTVSS

SEQ ID NO: 35 - protein, 123 aa, Artificial Sequence
  Description of Artificial Sequence: Synthetic polypeptide
EVQLVESGGGLVQPGGSLRLSCAASGRAFIAYAMGWFRQAPGKEREMVAAISWSGGITWYADSVKGRFTISADNSKNTAYLQMNSLKPEDTAVYYCAAASPGGAINYGRGYDWGQGTLVTVSS

SEQ ID NO: 36 - protein, 119 aa, Artificial Sequence
  Description of Artificial Sequence: Synthetic polypeptide
EVQLVESGGGLVQPGGSLRLSCAASGFTFSSYGMHWVRQAPGKGLEWVAVISPNGGNTYYPDSVKGRFTISRDNSKNTLYLQMNSLRAEDTAVYYCARHDHDYYAFDYWGQGTLVTVSS

SEQ ID NO: 37 - protein, 123 aa, Artificial Sequence
  Description of Artificial Sequence: Synthetic polypeptide
EVQLVQSGAEVKKPGSSVKVSCKASGGTFSSYAMSWVRQAPGQGLEWIGTINPGDGYTHYADKFKGRVTITRDTSTSTVYMELSRLRSEDTAVYYCARHTSSNGVYSTWFAYWGQGTLVTVSS

SEQ ID NO: 38 - protein, 116 aa, Artificial Sequence
  Description of Artificial Sequence: Synthetic polypeptide
EVQLVESGGGLVQPGGSLRLSCAASGGTFSLYAMGWFRQAPGKEREFVAAISWSGGSTIYADSVKGRFTISADNIKNTAYLHMNSLKPEDTAVYYCASNESDAYNWGQGTLVTVSS

SEQ ID NO: 39 - protein, 119 aa, Artificial Sequence
  Description of Artificial Sequence: Synthetic polypeptide
EVQLVESGGGLVQPGGSLRLSCAASGFTFSSYGMHWVRQAPGKGLEWVAYISYSGGEKYYADSVKGRFTISRDNSKNTLYLQMNSLRAEDTAVYYCARDDDGGDAFDYWGQGTLVTVSS

SEQ ID NO: 40 - protein, 123 aa, Artificial Sequence; identical to SEQ ID NO: 35
  Description of Artificial Sequence: Synthetic polypeptide

SEQ ID NO: 41 - protein, 122 aa, Artificial Sequence
  Description of Artificial Sequence: Synthetic polypeptide
EVQLVQSGAEVKKPGSSVKDSCKASGGTFSDYAMSWVRQAPGQGLEWIGRINPYDGYTHYNDKFKGRGTITRDTSTSTVYMELSSLRSEDTAVYYCARDYSSSFVFHAMDYWGQGTLVTVSS

SEQ ID NO: 42 - protein, 119 aa, Artificial Sequence
  Description of Artificial Sequence: Synthetic polypeptide
EVQLVESGGGLVQPGGSLRLSCAASGFTFSDYAMGWVRQAPGKGLEWVSYISYDGSNTYYPDSVKGRFTISRDNSKNTLYLQMNSLRAEDTAVYYCARIRTNYFGFDYWGQGTLVTVSS

SEQ ID NO: 43 - protein, 123 aa, Artificial Sequence; identical to SEQ ID NO: 35
  Description of Artificial Sequence: Synthetic polypeptide

SEQ ID NO: 44 - protein, 123 aa, Artificial Sequence; identical to SEQ ID NO: 35
  Description of Artificial Sequence: Synthetic polypeptide

SEQ ID NO: 45 - protein, 119 aa, Artificial Sequence
  Description of Artificial Sequence: Synthetic polypeptide
EVQLVESGGGLVQPGGSLRLSCAASGFTFSDYAMSLVRQAPGKGLEWVSVISYSGSETYYPDSVKGRFTISRDNSKNTLYLQMNSLRAEDTAVYYCARHLTNYDPFDYWGQGTLVTVSS

SEQ ID NO: 46 - protein, 111 aa, Artificial Sequence
  Description of Artificial Sequence: Synthetic polypeptide
EVQLVESGGGLVQPGGSLRLSCAASGFTFSDYGMSWVRQAPGKGLEWVSYISPDSVKGRFTISRDNSKNTLYLQMNSLRAEDTAVYYCARGDTNWFAFDYWGQGTLVTVSS

SEQ ID NO: 47 - protein, 119 aa, Artificial Sequence
  Description of Artificial Sequence: Synthetic polypeptide
EVQLVESGGGLVQPGGSLRLSCAASGFTFSNYAMHWVRQAPGKGLEWVSVISPNGGNKYYPDSVKGRFTISRDNSKNTLYLQMNSLRAEDTAWYYCARILTGGYPFDYWGQGTLVTVSS

SEQ ID NO: 48 - protein, 116 aa, Artificial Sequence
  Description of Artificial Sequence: Synthetic polypeptide
EVQLVESGGGLVQPGGSLRLSCAASGGTFSLYAMGWFRQAPGKEREFVAAISWSGGSTIYADSVKGRFTISADNSKNTAYLQMNSLKPEDTAVYYCASNESDAYNWGQGTLVTVSS

SEQ ID NO: 49 - protein, 119 aa, Artificial Sequence
  Description of Artificial Sequence: Synthetic polypeptide
EVQLVESGGGLVQPGGSLRLSCAASGFTFSDYGMGWVRQAPGKGLEWVSVISYDGSNTYYPDSVKGRFTISRDNSKNTLYLQMNSLRAEDTAVYYCARHRHYGYPFDYWGQGTLVTVSS

SEQ ID NO: 50 - protein, 119 aa, Artificial Sequence
  Description of Artificial Sequence: Synthetic polypeptide
EVKLVESGGGLVQPGGSLRLSCAASGFTFSNYAMSWVRQAPGKGLEWVAVISYSGGITYYADSVKGRFTISRDNSKNTLYLQMNSLRAEDTAVYYCARHRHYNYAFDYWGQGTLVTVSS

SEQ ID NO: 51 - protein, 119 aa, Artificial Sequence
  Description of Artificial Sequence: Synthetic polypeptide
EVQLVQSGAEVKKPGSSVKVSCKASGGTFSDYAMHWVRQAPGQGLEWIGRIRPGDGYTHYADKFKGRVTITRDTSTSTVYMELSSLRSEDTAVYYCARFGHSGRSFAYWGQGTLVTVSS

SEQ ID NO: 52 - protein, 124 aa, Artificial Sequence
  Description of Artificial Sequence: Synthetic polypeptide
EVQLVESGGGLVQPGGSLRLSCAASGFTFSSYYMHWVRQAPGKGLEWVAVISPSGGNKYYPDSVKGRFTISRDNSKNTLYLQMNSLRAEDTAVYYCARGKDDRLDYLGYYFDYWGQGTLVTVSS

SEQ ID NO: 53 - protein, 119 aa, Artificial Sequence
  Description of Artificial Sequence: Synthetic polypeptide
EVQLVESGGGLVQPGGSLRLSCAASGFTFSDYWMGWVRQAPGKGLEWVSVISPDGGNKYYADSVKGRFTISRDNSKNTLYLQMNSLRAEDTAVYYCARHLDGGDGFDYWGQGTLVTVSS

SEQ ID NO: 54 - protein, 119 aa, Artificial Sequence
  Description of Artificial Sequence: Synthetic polypeptide
EVQLVESGGGLVQPGGSLRLSCAASGFTFSDYWMSWVRQAPGKGLEWVAVISYDGSETYYPDSVKGRFTISRDNSKNTLYLQMNSLRAEDTAVYYCARDDRGYFGFDYWGQGTLVTVSS

SEQ ID NO: 55 - protein, 127 aa, Artificial Sequence
  Description of Artificial Sequence: Synthetic polypeptide
EVQLVESGGGLVQPGGSLRLSCAASGFTFSDYWMGWVRQAPGKGLEWVAYISYSGSIKYYADSVKGRFTISRDNSKNTLYLQMNSLRAEDTAVYYCARPSYLDSVYGHDGYYTLDVWGQGTLVTVSS

SEQ ID NO: 56 - protein, 122 aa, Artificial Sequence
  Description of Artificial Sequence: Synthetic polypeptide
EVQLVQSGAEVKKPGSSVKVSCKASGGTFSSYAMSLVRQAPGQGLEWIGTIRPGDGYTHYADKFKGRVTITRDTSTSTVYMELSSLRSEDTAVYYCARSLLPNTVTAYMDYWGQGTLVTVSS

SEQ ID NO: 57 - protein, 119 aa, Artificial Sequence
  Description of Artificial Sequence: Synthetic polypeptide
EVQLVESGGGLVQPGGSLRLSCAASGFTFSSYWMGWVRQAPGKGLEWVAYISYDGGITYYPDSVKGRFTISRDNSKNTLYLQMNSLRAEDTAVYYCARDDDGWYPFDYWGQGTLVTVSS

SEQ ID NO: 58 - protein, 122 aa, Artificial Sequence
  Description of Artificial Sequence: Synthetic polypeptide
EVQLVQSGAEVKKPGSSVKVSCKASGGTFSSYWMSWVRQAPGQGLEWIGVIRPYDGYTYYAQKFKGRVTITRDTSTSTVYMELSSLRSEDTAVYYCARHGYKSNYLSYMDYWGQGTLVTVSS

SEQ ID NO: 59 - protein, 119 aa, Artificial Sequence
  Description of Artificial Sequence: Synthetic polypeptide
EVQLVESGGGLVQPGGSLRLSCAASGFTFSSYAMGWVRQAPGKGLEWVSVISYSGGNTYYPDSVKGRFTISRDNSKNTLYLQMNSLRAEDTAVYYCARDDHGWYPFDYWGQGTLVTVSS

SEQ ID NO: 60 - protein, 119 aa, Artificial Sequence
  Description of Artificial Sequence: Synthetic polypeptide
EVQLVESGGGLVQPGGSLRLSCAASGFTFSDYAMHWVRQAPGKGLEWVSYISPSGSIKYYADSVKGRFTISRDNSKNTLYLQMNSLRAEDTAVYYCARGRHNNFGFDYWGQGTLVTVSS

SEQ ID NO: 61 - protein, 119 aa, Artificial Sequence
  Description of Artificial Sequence: Synthetic polypeptide
EVQLVESGGGLVQPGGSLRLSCAASGFTFSNYYMGWVRQAPGKGLEWVAYISYDGSIKYYPDSVKGRFTISRDNSKNTLYLQMNSLRAEDTAVYYCARILDYYFPFDYWGQGTLVTVSS

SEQ ID NO: 62 - protein, 123 aa, Artificial Sequence
  Description of Artificial Sequence: Synthetic polypeptide
EVQLVQSGAEVKKPGSSVKVSCKASGGTFSNYYMNWVRQAPGQGLEWIGRIRPGNGYTHYADKFKGRVTITRDTSTSTVYMELSSLRSEDTAVYYCARSESSFYVYQTAFAYWGQGTLVTVSS

SEQ ID NO: 63 - protein, 122 aa, Artificial Sequence
  Description of Artificial Sequence: Synthetic polypeptide
EVQLVQSGAEVKKPGSSVKVSCKASGGTFSSYAMSWVRQAPGQGLEWIGVIRPGDGYTKYADKFKGRVTITRDTSTSTVYMELSSLRSEDTAVYYCARSGLWYNVFNAMDYWGQGTLVTVSS

SEQ ID NO: 64 - protein, 127 aa, Artificial Sequence
  Description of Artificial Sequence: Synthetic polypeptide
EVQLVESGGGLVQPGGSLRLSCAASGFTFSDYYMGWVRQAPGKGLEWVAYISPSGGNKYYPDSVKGRFTISRDNSKNTLYLQMNSLRAEDTAVYYCARKSHYFGFWGNNGARTFDYWGQGTLVTVSS

SEQ ID NO: 65 - protein, 130 aa, Artificial Sequence
  Description of Artificial Sequence: Synthetic polypeptide
EVQLVESGGGLVQPGGSLRLSCAASGFTFSDYGMSWVRQAPGKGLEWVAVISYDGSNKYYADSVKGRFTISRDNSKNTLYLQMNSLRAEDTAVYYCARGELNRGDRYGYRYHKHRGMDVWGQGTLVTVSS

SEQ ID NO: 66 - protein, 122 aa, Artificial Sequence
  Description of Artificial Sequence: Synthetic polypeptide
EVQLVQSGAEVKKPGSSVKVSCKASGGTFSNYYMNWVRQAPGQGLEWIGTIRPNNGETKYNDKFKGRVTITRDTSTSTVYMELSSLRSEDTAVYYCARDLYWNFGGYAMDYWGQGTLVTVSS

SEQ ID NO: 67 - protein, 121 aa, Artificial Sequence
  Description of Artificial Sequence: Synthetic polypeptide
EVQLVQSGAEVKKPGSSVKVSCKASGGTFSDYAMHWVRQAPGQGLEWIGVINPNDGYTKYAQKFKGRVTITRDTSTSTVYMELSSLRSEDTAVYYCARSFFYYHYGAFDYWGQGTLVTVSS

SEQ ID NO: 68 - protein, 127 aa, Artificial Sequence
  Description of Artificial Sequence: Synthetic polypeptide
EVQLVESGGGLVQPGGSLRLSCAASGFTFSSYWMHWVRQAPGKGLEWVAVISYDGGNKYYPDSVKGRFTISRDNSKNTLYLQMNSLRAEDTAVYYCARIDGYYIRWTYYHARTFDYWGQGTLVTVSS

SEQ ID NO: 69 - protein, 127 aa, Artificial Sequence
  Description of Artificial Sequence: Synthetic polypeptide
EVQLVQSGAEVKKPGSSVKVSCKASGGTFSSYAMNWVRQAPGQGLEWIGTIRPNNGETKYNQKFKGRVTITRDTSTSTVYMELSSLRSEDTAVYYCARPSRPSHYSAFSHPYYMDYWGQGTLVTVSS

SEQ ID NO: 70 - protein, 124 aa, Artificial Sequence
  Description of Artificial Sequence: Synthetic polypeptide
EVQLVESGGGLVQPGGSLRLSCAASGFTFSDYAMHWVRQAPGKGLEWVAYISYSGSNKYYPDSVKGRFTISRDNSKNTLYLQMNSLRAEDTAVYYCARGPQSWYGLWGQNFDYWGQGTLVTVSS

SEQ ID NO: 71 - protein, 119 aa, Artificial Sequence
  Description of Artificial Sequence: Synthetic polypeptide
EVQLVESGGGLVQPGGSLRLSCAASGFTFSNYYMSWVRQAPGKGLEWVSVISPSGSETYYADSVKGRFTISRDNSKNTLYLQMNSLRAEDTAVYYCARHLDNGFPFDYWGQGTLVTVSS

SEQ ID NO: 72 - protein, 127 aa, Artificial Sequence
  Description of Artificial Sequence: Synthetic polypeptide
EVQLVESGGGLVQPGGSLRLSCAASGFTFSDYAMHWVRQAPGKGLEWVSVISYDGSITYYPDSVKGRFTISRDNSKNTLYLQMNSLRAEDTAVYYCARIRHRFILWRNYGARGMDYWGQGTLVTVSS

SEQ ID NO: 73 - protein, 124 aa, Artificial Sequence
  Description of Artificial Sequence: Synthetic polypeptide
EVQLVESGGGLVQPGGSLRLSCAASGFTFSSYWMSWVRQAPGKGLEWVSVISPSGSETYYADSVKGRFTISRDNSKNTLYLQMNSLRAEDTAVYYCARDRDRYLDLHRYPFDYWGQGTLVTVSS

SEQ ID NO: 74 - protein, 122 aa, Artificial Sequence
  Description of Artificial Sequence: Synthetic polypeptide
EVQLVQSGAEVKKPGSSVKVSCKASGGTFSSYAMNWVRQAPGQGLEWIGRINPNNGYTHYADKFKGRVTITRDTSTSTVYMELSSLRSEDTAVYYCARLLSKSNNLHAMDYWGQGTLVTVSS

SEQ ID NO: 75 - protein, 127 aa, Artificial Sequence
  Description of Artificial Sequence: Synthetic polypeptide
EVQLVQSGAEVKKPGSSVKVSCKASGGTFSSYWMSWVRQAPGQGLEWIGVIRPGNGYTYYNQKFKGRVTITRDTSTSTVYMELSSLRSEDTAVYYCARGGAYYYTSITSHGFQFDYWGQGTLVTVSS

SEQ ID NO: 76 - protein, 123 aa, Artificial Sequence
  Description of Artificial Sequence: Synthetic polypeptide
EVQLVQSGAEVKKPGSSVKVSCKASGGTFSDYWMHWVRQAPGQGLEWIGRIRPYDGYTKYNQKFKGRVTITRDTSTSTVYMELSSLRSEDTAVYYCARSTIGYDYGYYGFDYWGQGTLVTVSS

SEQ ID NO: 77 - protein, 121 aa, Artificial Sequence
  Description of Artificial Sequence: Synthetic polypeptide
EVQLVESGGGLVQPGGSLRLSCAASGFTFSDYAMGWVRQAPGKGLEWVSANKYYADSVKGRFTISRDNSKNTLYLQMNSLRAEDTAVYYCARRVYWDGFYTQDYYYTLDVWGQGTLVTVSS

SEQ ID NO: 78 - protein, 124 aa, Artificial Sequence
  Description of Artificial Sequence: Synthetic polypeptide
EVQLVESGGGLVQPGGSLRLSCAASGFTFSDYWMHWVRQAPGKGLEWVAYISYNGGITYYPDSVKGRFTISRDNSKNTLYLQMNSLRAEDTAVYYCARDTSSWTPLLTFYFDYWGQGTLVTVSS

SEQ ID NO: 79 - protein, 119 aa, Artificial Sequence
  Description of Artificial Sequence: Synthetic polypeptide
EVQLVESGGGLVQPGGSLRLSCAASGFTFSDYAMHWVRQAPGKGLEWVSYISYDGSETYYADSVKGRFTISRDNSKNTLYLQMNSLRAEDTAVYYCARHLHDNDAFDYWGQGTLVTVSS

SEQ ID NO: 80 - protein, 119 aa, Artificial Sequence
  Description of Artificial Sequence: Synthetic polypeptide
EVQLVESGGGLVQPGGSLRLSCAASGFTFSNYGMHWVRQAPGKGLEWVAYISYSGGITYYPDSVKGRFTISRDNSKNTLYLQMNSLRAEDTAVYYCARHRTDGYPFDYWGQGTLVTVSS

SEQ ID NO: 81 - protein, 127 aa, Artificial Sequence
  Description of Artificial Sequence: Synthetic polypeptide
EVQLVESGGGLVQPGGSLRLSCAASGFTFSNYWMHWVRQAPGKGLEWVSVISYSGGNKYYPDSVKGRFTISRDNSKNTLYLQMNSLRAEDTAVYYCARKDGLYDRSGYRHARTFDYWGQGTLVTVSS

SEQ ID NO: 82 - protein, 130 aa, Artificial Sequence
  Description of Artificial Sequence: Synthetic polypeptide
EVQLVESGGGLVQPGGSLRLSCAASGFTFSDYWMHWVRQAPGKGLEWVSYISPSGGEKYYADSVKGRFTISRDNSKNTLYLQMNSLRAEDTAVYYCARDEDYYYDGSRFNGGYYGPMDVWGQGTLVTVSS

SEQ ID NO: 83 - protein, 127 aa, Artificial Sequence
  Description of Artificial Sequence: Synthetic polypeptide
EVQLVESGGGLVQPGGSLRLSCAASGFTFSDYWMSWVRQAPGKGLEWVAYISPSGGNKYYPDSVKGRFTISRDNSKNTLYLQMNSLRAEDTAVYYCARRDYWYSVYTHRYARTFDVWGQGTLVTVSS

SEQ ID NO: 84 - protein, 119 aa, Artificial Sequence
  Description of Artificial Sequence: Synthetic polypeptide
EVQLVESGGGLVQPGGSLRLSCAASGFTFSNYWMGWVRQAPGKGLEWVSVISYDGSITYYPDSVKGRFTISRDNSKNTLYLQMNSLRAEDTAVYYCARDRHGNYAFDYWGQGTLVTVSS

SEQ ID NO: 85 - protein, 119 aa, Artificial Sequence
  Description of Artificial Sequence: Synthetic polypeptide
EVQLVQSGAEVKKPGSSVKVSCKASGGTFSSYYMSWVRQAPGQGLEWIGRIRPYDGYTHYNQKFKGRVTITRDTSTSTVYMELSSLRSEDTAVYYCARRGYSRDWFAYWGQGTLVTVSS

SEQ ID NO: 86 - protein, 123 aa, Artificial Sequence
  Description of Artificial Sequence: Synthetic polypeptide
EVQLVQSGAEVKKPGSSVKVSCKASGGTFSDYWMSWVRQAPGQGLEWIGRIRPGDGETYYAQKFKGRVTITRDTSTSTVYMELSSLRSEDTAVYYCARLFFSSDDFAFAFDYWGQGTLVTVSS

SEQ ID NO: 87 - protein, 119 aa, Artificial Sequence
  Description of Artificial Sequence: Synthetic polypeptide
EVQLVESGGGLVQPGGSLRLSCAASGFTFSDYWMGWVRQAPGKGLEWVAVISYSGSNTYYPDSVKGRFTISRDNSKNTLYLQMNSLRAEDTAVYYCARDLTGYYPFDYWGQGTLVTVSS

SEQ ID NO: 88 - protein, 124 aa, Artificial Sequence
  Description of Artificial Sequence: Synthetic polypeptide
EVQLVESGGGLVQPGGSLRLSCAASGFTFSDYAMSWVRQAPGKGLEWVAYISPSGSNKYYPDSVKGRFTISRDNSKNTLYLQMNSLRAEDTAVYYCARDDDGYLDYLRFNFDYWGQGTLVTVSS

SEQ ID NO: 89 - protein, 122 aa, Artificial Sequence
  Description of Artificial Sequence: Synthetic polypeptide
EVQLVQSGAEVKKPGSSVKVSCKASGGTFSNYWMNWVRQAPGQGLEWIGVIRPNNGETHYNQKFKGRVTITRDTSTSTVYMELSSLRSEDTAVYYCARLYGPNTVTYYMDYWGQGTLVTVSS

SEQ ID NO: 90 - protein, 127 aa, Artificial Sequence
  Description of Artificial Sequence: Synthetic polypeptide
EVQLVQSGAEVKKPGSSVKVSCKASGGTFSSYAMHWVRQAPGQGLEWIGRINPNNGETKYAQKFKGRVTITRDTSTSTVYMELSSLRSEDTAVYYCARGSAYYHYYYYSHGGAFAYWGQGTLVTVSS

SEQ ID NO: 91 - protein, 127 aa, Artificial Sequence
  Description of Artificial Sequence: Synthetic polypeptide
EVQLVESGGGLVQPGGSLRLSCAASGFTFSSYYMHWVRQAPGKGLEWVAYISPDGGNKYYPDSVKGRFTISRDNSKNTLYLQMNSLRAEDTAVYYCARRVHWYGRYTHNYYYGLDVWGQGTLVTVSS

SEQ ID NO: 92 - protein, 123 aa, Artificial Sequence
  Description of Artificial Sequence: Synthetic polypeptide
EVQLVQSGAEVKKPGSPVKVSCKASGGTFSSYWMNWVRQAPGQGLEWIGVINPGDGYTKYNQKFKGRVTITRDTSTSTVYMELSSLRSEDTAVYYCARHESGYGVGAYGFAYWGQGTLVTVSS

SEQ ID NO: 93 - protein, 127 aa, Artificial Sequence
  Description of Artificial Sequence: Synthetic polypeptide
EVQLVQSGAEVKKPGSSVKVSCKASGGTFSDYAMHWVRQAPGQGLEWIGVINPYNGYTKYADKFKGRVTITRDTSTSTVYMELSSLRSEDTAVYYCARPGEPYDTYITSFGFQMDYWGQGTLVTVSS

SEQ ID NO: 94 - protein, 124 aa, Artificial Sequence
  Description of Artificial Sequence: Synthetic polypeptide
EVQLVESGGGLVQPGGSLRLSCAASGFTFSNYAMSWVRQAPGKGLEWVAVISYDGSEKYYADSVKGRFTISRDNSKNTLYLQMNSLRAEDTAVYYCARGRSDYYDLHTHNFDYWGQGTLVTVSS

SEQ ID NO: 95 - protein, 122 aa, Artificial Sequence
  Description of Artificial Sequence: Synthetic polypeptide
EVQLVQSGAEVKKPGSSVKVSCKASGGTFSSYWMHWVRQAPGQGLEWIGRINPGDGYTYYNDKFKGRVTITRDTSTSTVYMELSSLRSEDTAVYYCARLESKYDVGSAMDYWGQGTLVTVSS

SEQ ID NO: 96 - protein, 127 aa, Artificial Sequence
  Description of Artificial Sequence: Synthetic polypeptide
EVQLVESGGGLVQPGGSLRLSCAASGFTFSSYGMSWVRQAPGKGLEWVSYISPSGGNTYYADSVKGRFTISRDNSKNTLYLQMNSLRAEDTAVYYCARISVRYIRTGNDYARTMDYWGQGTLVTVSS

SEQ ID NO: 97 - protein, 127 aa, Artificial Sequence
  Description of Artificial Sequence: Synthetic polypeptide
EVQLVESGGGLVQPGGSLRLSCAASGFTFSSYAMGWVRQAPGKGLEWVAVISYSGSNKYYADSVKGRFTISRDNSKNTLYLQMNSLRAEDTAVYYCARIDHWDGRWGYYHARTMDVWGQGTLVTVSS

SEQ ID NO: 98 - protein, 124 aa, Artificial Sequence
  Description of Artificial Sequence: Synthetic polypeptide
EVQLVESGGGLVQPGGSLRLSCAASGFTFSSYGMHWVRQAPGKGLEWVSVISPNGGETYYPDSVKGRFTISRDNSKNTLYLQMNSLRAEDTAVYYCARGTSRYLPLHTYYFDYWGQGTLVTVSS

SEQ ID NO: 99 - protein, 119 aa, Artificial Sequence
  Description of Artificial Sequence: Synthetic polypeptide
EVQLVESGGGLVQPGGSLRLSCAASGFTFSDYWMHWVRQAPGKGLEWVSVISYSGGETYYPDSVKGRFTISRDNSKNTLYLQMNSLRAEDTAVYYCARIRTYNYPFDYWGQGTLVTVSS

SEQ ID NO: 100 - protein, 122 aa, Artificial Sequence
  Description of Artificial Sequence: Synthetic polypeptide
EVQLVQSGAEVKKPGSSVKVSCKASGGTFSNYAMHLVRQAPGQGLEWIGTINPYNGYTYYADKFKGRVTITRDTSTSTVYMELSSLRSEDTAVYYCARHYLWYYYFAAMDYWGQGTLVTVSS

SEQ ID NO: 101 - protein, 119 aa, Artificial Sequence
  Description of Artificial Sequence: Synthetic polypeptide
EVQLVESGGGLVQPGGSLRLSCAASGFTFSSYWMSWVRQAPGKGLEWVSVISYSGSNKYYADSVKGRFTISRDNSKNTLYLQMNSLRAEDTAVYYCARIDTDNFAFDYWGQGTLVTVSS

SEQ ID NO: 102 - protein, 130 aa, Artificial Sequence
  Description of Artificial Sequence: Synthetic polypeptide
EVQLVESGGGLVQPGGSLRLSCAASGFTFSDYYMHWVRQAPGKGLEWVSYISPDGGIKYYPDSVKGRFTISRDNSKNTLYLQMNSLRAEDTAVYYCARDEDYYGIFYGQNHYFGFGMDVWGQGTLVTVSS

SEQ ID NO: 103 - protein, 127 aa, Artificial Sequence
  Description of Artificial Sequence: Synthetic polypeptide
EVQLVQSGAEVKKPGSSVKVSCKASGGTFSSYAMNWVRQAPGQGLEWIGVIRPNNGYTHYNDKFKGRVTITRDTSTSTVYMELSSLRSEDTAVYYCARPSAYIDVSYTSFYGYFAYWGQGTLVTVSS

SEQ ID NO: 104 - protein, 119 aa, Artificial Sequence
  Description of Artificial Sequence: Synthetic polypeptide
EVQLVESGGGLVQPGGSLRLSCAASGFTFSSYWMHWVRQAPGKGLEWVSYISPSGGNTYYPDSVKGRFTISRDNSKNTLYLQMNSLRAEDTAVYYCARDRDYNFAFDYWSQGTLVTVSS

SEQ ID NO: 105 - protein, 130 aa, Artificial Sequence
  Description of Artificial Sequence: Synthetic polypeptide
EVQLVESGGGLVQPGGSLRLSCAASGFTFSSYWMSWVRQAPGKGLEWVSYISPDGSNKYYADSVKGRFTISRDNSKNTLYLQMNSLRAEDTAVYYCARDRLHYGDSWRYNHHKYGGMDVWGQGTLVTVSS

SEQ ID NO: 106 - protein, 119 aa, Artificial Sequence
  Description of Artificial Sequence: Synthetic polypeptide
EVQLVESGGGLVQPGGSLRLSCAASGFTFSNYGMSWVRQAPGKGLEWVSYISYDGGNKYYPDSVKGRFTISRDNSKNTLYLQMNSLRAEDTAVYYCARIRDYGYGFDYWGQGTLVTVSS

SEQ ID NO: 107 - protein, 122 aa, Artificial Sequence
  Description of Artificial Sequence: Synthetic polypeptide
EVQLVQSGAEVKKPGSSVKVSCKASGGTFSSYAMNWVRQAPGQGLEWIGVIRPYDGYTHYNDKFKGRVTITRDTSTSTVYMELSSLRSEDTAVYYCARSYYKHNNLAYMDYWGQGTLVTVSS

SEQ ID NO: 108 - protein, 122 aa, Artificial Sequence
  Description of Artificial Sequence: Synthetic polypeptide
EVQLVQSGAEVKKPGSSVKVSCKASGGTFSSYAMNWVRQAPGQGLEWIGRIRPGNGETHYNQKFKGRVTITRDTSTSTVYMELSSLRSEDTAVYYCARHLSKYFVTNAMDYWGQGTLVTVSS

SEQ ID NO: 109 - protein, 127 aa, Artificial Sequence
  Description of Artificial Sequence: Synthetic polypeptide
EVQLVESGGGLVQPGGSLRLSCAASGFTFSNYAMSWVRQAPGKGLEWVAVISPDGGIKYYADSVKGRFTISRDNSKNTLYLQMNSLRAEDTAVYYCARIVGRDDRSGNDYYRTMDYWGQGTLVTVSS

SEQ ID NO: 110 - protein, 119 aa, Artificial Sequence
  Description of Artificial Sequence: Synthetic polypeptide
EVQLVESGGGLVQPGGSLRLSCAASGFTFSNYYMHWVRQAPGKGLEWVSVISYSGGEKYYPDSVKGRFTISRDNSKNTLYLQMNSLRAEDTAVYYCARIDHDNYGFDYWGQGTLVTVSS

SEQ ID NO: 111 - protein, 123 aa, Artificial Sequence
  Description of Artificial Sequence: Synthetic polypeptide
EVQLVQSGAEVKKPGSSVKVSCKASGGTFSSYYMHWVRQAPGQGLEWIGVIRPYNGYTKYNQKFKGRVTITRDTSTSTVYMELSSLRSEDTAVYYCARDFFGNYVYSFWFDYWGQGTLVTVSS

SEQ ID NO: 112 - protein, 130 aa, Artificial Sequence
  Description of Artificial Sequence: Synthetic polypeptide
EVQLVESGGGLVQPGGSLRLSCAASGFTFSSYYMSWVRQAPGKGLEWVSYISYDGGETYYADSVKGRFTISRDNSKNTLYLQMNSLRAEDTAVYYCARDELYYYIGWGHDHHFHRGMDVWGQGTLVTVSS

SEQ ID NO: 113 - protein, 124 aa, Artificial Sequence
  Description of Artificial Sequence: Synthetic polypeptide
EVQLVESGGGLVQPGGSLRLSCAASGFTFSDYYMHWVRQAPGKGLEWVSVISYSGSEKYYPDSVKGRFTISRDNSKNTLYLQMNSLRAEDTAVYYCARGDRGYYSFWTHPFDYWGQGTLVTVSS

SEQ ID NO: 114 - protein, 119 aa, Artificial Sequence
  Description of Artificial Sequence: Synthetic polypeptide
EVQLVESGGGLVQPGGSLRLSCAASGFTFSDYGMSWVRQAPGKGLEWVAYISPDGGEKYYPDSVKGRFTISRDNSKNTLYLQMNSLRAEDTAVYYCARDRTNGFGFDYWGQGTLVTVSS

SEQ ID NO: 115 - protein, 130 aa, Artificial Sequence
  Description of Artificial Sequence: Synthetic polypeptide
EVQLVESGGGLVQPGGSLRLSCAASGFTFSDYWMHWVRQAPGKGLEWVAYISPDGGNKYYPDSVKGRFTISRDNSKNTLYLQMNSLRAEDTAVYYCARGELHRGSSTRYDFHYYRGMDVWGQGTLVTVSS

SEQ ID NO: 116 - protein, 127 aa, Artificial Sequence
  Description of Artificial Sequence: Synthetic polypeptide
EVQLVESGGGLVQPGGSLRLSCAASGFTFSDYGMHWVRQAPGKGLEWVAYISYSGGITYYPDSVKGRFTISRDNSKNTLYLQMNSLRAEDTEVYYCARPSYYDSLWRHRYYRTFDVWGQGTLVTVSS

SEQ ID NO: 117 - protein, 119 aa, Artificial Sequence
  Description of Artificial Sequence: Synthetic polypeptide
EVQLVESGGGLVQPGGSLRLSCAASGFTFSSYAMGWVRQAPGKGLEWVAVISPDGSITYYPDSVKGRFTISRDNSKNTLYLQMNSLRAEDTAVYYCARHRTDNFPFDYWGQGTLVTVSS

SEQ ID NO: 118 - protein, 123 aa, Artificial Sequence
  Description of Artificial Sequence: Synthetic polypeptide
EVQLVQSGAEVKKPGSSVKVSCKASGGTFSNYWMSWVRQAPGQGLEWIGRINPYNGETYYNDKFKGRVTITRDTSTSTVYMELSSLRSEDTAVYYCARSPFGFTYYSTYFAYWGQGTLVTVSS

SEQ ID NO: 119 - protein, 127 aa, Artificial Sequence
  Description of Artificial Sequence: Synthetic polypeptide
EVQLVESGGGLVQPGGSLRLSCAASGFTFSNYAMHWVRQAPGKGLEWVSVISPSGGITYYADSVKGRFTISRDNSKNTLYLQMNSLRAEDTAVYYCARPRYLFGRTGNRYYYTLDVWGQGTLVTVSS

SEQ ID NO: 120 - protein, 122 aa, Artificial Sequence
  Description of Artificial Sequence: Synthetic polypeptide
EVQLVQSGAEVKKPGSSVKVSCKASGGTFSSYWMNWVRQAPGQGLEWIGVIRPYDGYTHYNDKFKGRVTITRDTSTSTVYMELSSLRSEDTAVYYCARHYSDYTDTSYMDYWGQGTLVTVSS

SEQ ID NO: 121 - protein, 119 aa, Artificial Sequence
  Description of Artificial Sequence: Synthetic polypeptide
EVQLVESGGGLVQPGGSLRLSCAASGFTFSDYYMHWVRQAPGKGLEWVSYISPDGGITYYPDSVKGRFTISRDNSKNTLYLQMNSLRAEDTAVYYCARDDTNNDPFDYWGQGTLVTVSS

SEQ ID NO: 122 - protein, 130 aa, Artificial Sequence
  Description of Artificial Sequence: Synthetic polypeptide
EVQLVESGGGLVQPGGSLRLSCAASGFTFSSYGMSWVRQAPGKGLEWVAYISYSGSEKYYADSVKGRFTISRDNSKNTLYLQMNSLRAEDTAVYYCARGEGHYYDSTRQRFYFYFPMDVWGQGTLVTVSS

SEQ ID NO: 123 - protein, 127 aa, Artificial Sequence
  Description of Artificial Sequence: Synthetic polypeptide
EVQLVESGGGLVQPGGSLRLSCAASGFTFSDYAMGWVRQAPGKGLEWVAVISPSGSNKYYADSVKGRFTISRDNSKNTLYLQMNSLRAEDTAVYYCARRRYRFGFWRQHHAYTFDVWGQGTLVTVSS

SEQ ID NO: 124 - protein, 122 aa, Artificial Sequence
  Description of Artificial Sequence: Synthetic polypeptide
EVQLVQSGAEVKKPGSSVKVSCKASGGTFSNYWMNWVRQAPGQGLEWIGVIRPGNGETKYADKFKGRVTITRDTSTSTVYMELSSLRSEDTAVYYCARSYLSSYDLYAMDYWGQGTLVTVSS

SEQ ID NO: 125 - protein, 124 aa, Artificial Sequence
  Description of Artificial Sequence: Synthetic polypeptide
EVQLVESGGGLVQPGGSLRLSCAASGFTFSNYWMHWVRQAPGKGLEWVSVISPSGSEKYYPDSVKGRFTISRDNSKNTLYLQMNSLRAEDTAVYYCARDKDSNGILHGQNFDYWGQGTLVTVSS

SEQ ID NO: 126 - protein, 119 aa, Artificial Sequence
  Description of Artificial Sequence: Synthetic polypeptide
EVQLVQSGAEVKKPGSSVKVSCKASGGTFSNYYMSWVRQAPGQGLEWIGRIRPGDGYTYYADKFKGRVTITRDTSTSTVYMELSSLRSEDTAVYYCARGYNWARKLVYWGQGTLVTVSS

SEQ ID NO: 127 - protein, 124 aa, Artificial Sequence
  Description of Artificial Sequence: Synthetic polypeptide
EVQLVESGGGLVQPGGSLRLSCAASGFTFSSYWMSWVRQAPGKGLEWVSVISYDGSEKYYPDSVKGRFTISRDNSKNTLYLQMNSLRAEDTAVYYCARGKSGWYPLHGQNFDYWGQGTLVTVSS

SEQ ID NO: 128 - protein, 123 aa, Artificial Sequence
  Description of Artificial Sequence: Synthetic polypeptide
EVQLVQSGAEVKKPGSSVKVSCKASGGTFSSYWMNWVRQAPGQGLEWIGVIRPNNGYTHYADKFKGRVTITRDTSTSTVYMELSSLRSEDTAVYYCARHFIYYGGFSTGFDYWGQGTLVTVSS

SEQ ID NO: 129 - protein, 124 aa, Artificial Sequence
  Description of Artificial Sequence: Synthetic polypeptide
EVQLVESGGGLVQPGGSLRLSCAASGFTFSSYYMSWVRQAPGKGLEWVSVISPNGGEKYYPDSVKGRFTISRDNSKNTLYLQMNSLRAEDTAVYYCARGDQDNGGRLGYYFDYWGQGTLVTVSS

SEQ ID NO: 130 - protein, 119 aa, Artificial Sequence
  Description of Artificial Sequence: Synthetic polypeptide
EVQLVESGGGLVQPGGSLRLSCAASGFTFSNYWMHWVRQAPGKGLEWVAVISYSGGITYYPDSVKGRFTISRDNSKNTLYLQMNSLRAEDTAVYYCARDRTNYFPFDYWGQGTLVTVSS

SEQ ID NO: 131 - protein, 127 aa, Artificial Sequence
  Description of Artificial Sequence: Synthetic polypeptide
EVQLVESGGGLVQPGGSLRLSCAASGFTFSDYYMSWVRQAPGKGLEWVSVISPSGGITYYPDSVKGRFTISRDNSKNTLYLQMNSLRAEDTAVYYCARISHYVGLWRHYYYRGFDVWGQGTLVTVSS

SEQ ID NO: 132 - protein, 123 aa, Artificial Sequence
  Description of Artificial Sequence: Synthetic polypeptide
EVQLVQSGAEVKKPGSSVKVSCKASGGTFSDYYMSWVRQAPGQGLEWIGTIRPNNGETKYNQKFKGRVTITRDTSTSTVYMELSSLRSEDTAVYYCARLTSRSTDGQFAFDYWGQGTLVTVSS

SEQ ID NO: 133 - protein, 127 aa, Artificial Sequence
  Description of Artificial Sequence: Synthetic polypeptide
EVQLVESGGGLVQPGGSLRLSCAASGFTFSDYAMGWVRQAPGKGLEWVAYISYSGSNTYYPDSVKGRFTISRDNSKNTLYLQMNSLRAEDTAVYYCARISVYFDLWGYYHYYGLDYWGQGTLVTVSS

SEQ ID NO: 134 - protein, 123 aa, Artificial Sequence
  Description of Artificial Sequence: Synthetic polypeptide
EVQLVQSGAEVKKPGSSVKVSCKASGGTFSSYWMNWVRQAPGQGLEWIGTIRPNDGETKYNDKFKGRVTITRDTSTSTVYMELSSLRSEDTAVYYCARLTFRFTNGYGGFDYWGQGTLVTVSS

SEQ ID NO: 135 - protein, 130 aa, Artificial Sequence
  Description of Artificial Sequence: Synthetic polypeptide
EVQLVESGGGLVQPGGSLRLSCAASGFTFSNYAMGWVRQAPGKGLEWVSYISPSGSIKYYPDSVKGRFTISRDNSKNTLYLQMNSLRAEDTAVYYCARGRGYYYIGTGHRGHKHRPMDVWGQGTLVTVSS

SEQ ID NO: 136 - protein, 124 aa, Artificial Sequence
  Description of Artificial Sequence: Synthetic polypeptide
EVQLVESGGGLVQPGGSLRLSCAASGFTFSDYWMHWVRQAPGKGLEWVSVISPNGGITYYPDSVKGRFTISRDNSKNTLYLQMNSLRAEDTAVYYCARDTDSRLPYHRQPFDYWGQGTLVTVSS

SEQ ID NO: 137 - protein, 122 aa, Artificial Sequence
  Description of Artificial Sequence: Synthetic polypeptide
EVQLVQSGAEVKKPGSSVKVSCKASGGTFSNYYMHWVRQAPGQGLEWIGTIRPNNGYTKYNDKFKGRVTITRDTSTSTVYMELSSLRSEDTAVYYCARLYYSSYNLAAMDYWGQGTLVTVSS

SEQ ID NO: 138 - protein, 119 aa, Artificial Sequence
  Description of Artificial Sequence: Synthetic polypeptide
EVQLVQSGAEVKKPGSSVKVSCKASGGTFSSYWMSWVRQAPGQGLEWIGTINPGDGYTKYNDKFKGRVTITRDTSTSTVYMELSSLRSEDTAVYYCARFYYYFDKLVYWGQGTLVTVSS

SEQ ID NO: 139 - protein, 113 aa, Artificial Sequence
  Description of Artificial Sequence: Synthetic polypeptide
EVQLVESGGGLVQPGGSLRLSCAASGFTFSSYGMHWVRQAPGKGLEWVAYITYYPDSVKGRFTISRDNSKNTLYLQMNSLRAEDTAVYYCARGDDGNFPFDYWGQGTLVTVSS

SEQ ID NO: 140 - protein, 124 aa, Artificial Sequence
  Description of Artificial Sequence: Synthetic polypeptide
EVQLVQSGAEVKKPGSSVKVSCKASGGTFSSYAMNWVRQAPGQGLEWIGRIRPNNGYNDKFKGRVTITRDTSTSTVYMELSSLRSEDTAVYYCARPGEYMDYEITYAPFQFAYWGQGTLVTVSS

SEQ ID NO: 141 - protein, 119 aa, Artificial Sequence; identical to SEQ ID NO: 51
  Description of Artificial Sequence: Synthetic polypeptide

SEQ ID NO: 142 - protein, 123 aa, Artificial Sequence
  Description of Artificial Sequence: Synthetic polypeptide
EVQLVQSGAEVKKPGSSVKVSCKASGGTFSNYWMNWVRQAPGQGLEWIGRINPGNGETHYADKFKGRVTITRDTSTSTVYMELSSLRSEDTAVYYCARDPIDSYYFAYGFDYWGQGTLVTVSS

SEQ ID NO: 143 - protein, 127 aa, Artificial Sequence
  Description of Artificial Sequence: Synthetic polypeptide
EVQLVQSGAEVKKPGSSVKVSCKASGGTFSDYAMNWVRQAPGQGLEWIGRINPNDGETYYNQKFKGRVTITRDTSTSTVYMELSSLRSEDTAVYYCARHGAPMSVSYTSHPFQMDYWGQGTLVTVSS

SEQ ID NO: 144 - protein, 119 aa, Artificial Sequence
  Description of Artificial Sequence: Synthetic polypeptide
EVQLVQSGAEVKKPGSSVKVSCKASGGTFSDYAMSWVRQAPGQGLEWIGRIRPGNGYTHYNDKFKGRVTITRDTSTSTVYMELSSLRSEDTAVYYCARFYYYGAWLDYWGQGTLVTVSS

SEQ ID NO: 145 - protein, 127 aa, Artificial Sequence
  Description of Artificial Sequence: Synthetic polypeptide
EVQLVESGGGLVQPGGSLRLSCAASGFTFSSYYMSLVRQAPGKGLEWVSVISYDGSEKYYADSVKGRFTISRDNSKNTLYLQMNSLRAEDTAVYYCARPSHYYDLWTQYYAYGLDYWGQGTLVTVSS

SEQ ID NO: 146 - protein, 123 aa, Artificial Sequence
  Description of Artificial Sequence: Synthetic polypeptide
EVQLVQSGAEVKKPGSSVKVSCKASGGTFSNYAMNWVRQAPGQGLEWIGRIRPNNGETHYNQKFKGRVTITRDTSTSTVYMELSSLRSEDTAVYYCARHTISYGYSQTWFDYWGQGTLVTVSS

SEQ ID NO: 147 - protein, 123 aa, Artificial Sequence
  Description of Artificial Sequence: Synthetic polypeptide
EVQLVQSGAEVKKPGSSVKVSCKASGGTFSNYWMNWVRQAPGQGLEWIGVINPYDGYTHYADKFKGRVTITRDTSTSTVYMELSSLRSEDTAVYYCARLTGYFDVFAYGFDYWGQGTLVTVSS

SEQ ID NO: 148 - protein, 125 aa, Artificial Sequence
  Description of Artificial Sequence: Synthetic polypeptide
EVQLVESGGGLVQPGGSLRLSCAASGFTFWVRQAPGKGLEWVSYISYDGGSIKYYPDSVKGRFTISRDNSKNTLYLQMNSLRAEDTAVYYCARDRGYYYDGTTYNFGKGFPMDVWGQGTLVTVSS

SEQ ID NO: 149 - protein, 123 aa, Artificial Sequence
  Description of Artificial Sequence: Synthetic polypeptide
EVQLVQSGAEVKKPGSSVKVSCKASGGTFSDYYMSWVRQAPGQGLEWIGTINPYDGYTYYADKFKGRVTITRDTSTSTVYMELSSLRSEDTAVYYCARLSFGNDYFQYAFDYWGQGTLVTVSS

SEQ ID NO: 150 - protein, 127 aa, Artificial Sequence
  Description of Artificial Sequence: Synthetic polypeptide
EVQLVESGGGLVQPGGSLRLSCAASGFTFSSYWMHWVRQAPGKGLEWVSYISPDGSNKYYPDSVKGRFTISRDNSKNTLYLQMNSLRAEDTAVYYCARKRHYDIFYGQRGARTFDVWGQGTLVTVSS

SEQ ID NO: 151 - protein, 124 aa, Artificial Sequence
  Description of Artificial Sequence: Synthetic polypeptide
EVQLVESGGGLVQPGGSLRLSCAASGFTFSSYYMHWVRQAPGKGLEWVSVISPNGGIKYYADSVKGRFTISRDNSKNTLYLQMNSLRAEDTAVYYCARDKSDYGIYWTQGFDYWGQGTLVTVSS

SEQ ID NO: 152 - protein, 123 aa, Artificial Sequence
  Description of Artificial Sequence: Synthetic polypeptide
EVQLVQSGAEVKKPGSSVKVSCKASGGTFSSYWMSWVRQAPGQGLEWIGRIRPNNGYTKYNQKFKGRVTITRDTSTSTVYMELSSLRSEDTAVYYCARSFSSNGGYSGAFAYWGQGTLVTVSS

SEQ ID NO: 153 - protein, 119 aa, Artificial Sequence
  Description of Artificial Sequence: Synthetic polypeptide
EVQLVESGGGLVQPGGSLRLSCAASGFTFSDYWMHWVRQAPGKGLEWVSVISYDGGEKYYPDSVKGRFTISRDNSKNTLYLQMNSLRAEDTAVYYCARHLDYGYGFDYWGQGTLVTVSS

SEQ ID NO: 154 - protein, 130 aa, Artificial Sequence
  Description of Artificial Sequence: Synthetic polypeptide
EVQLVESGGGLVQPGGSLRLSCAASGFTFSSYYMGWVRQAPGKGLEWVSYISYNGGNTYYPDSVKGRFTISRDNSKNTLYLQMNSLRAEDTAVYYCARDRDNYYSSTGQYFHKGRPMDVWGQGTLVTVSS

SEQ ID NO: 155 - protein, 124 aa, Artificial Sequence
  Description of Artificial Sequence: Synthetic polypeptide
EVQLVESGGGLVQPGGSLRLSCAASGFTFSNYAMGLVRQAPGKGLEWVSYISYSGSETYYADSVKGRFTISRDNSKNTLYLQMNSLRAEDTAVYYCARGTDSYGDFYTFNFDYWGQGTLVTVSS

SEQ ID NO: 156 - protein, 127 aa, Artificial Sequence
  Description of Artificial Sequence: Synthetic polypeptide
EVQLVESGGGLVQPGGSLRLSCAASGFTFSNYGMHWVRQAPGKGLEWVAYISYSGGNKYYADSVKGRFTISRDNSKNTLYLQMNSLRAEDTAVYYCARPDVRDILWRYYYYRGMDYWGQGTLVTVSS

SEQ ID NO: 157 - protein, 130 aa, Artificial Sequence
  Description of Artificial Sequence: Synthetic polypeptide
EVQLVESGGGLVQPGGSLRLSCAASGFTFSNYWMSWVRQAPGKGLEWVAYISYDGSNTYYPDSVKGRFTISRDNSKNTLYLQMNSLRAEDTAVYYCARDEGHYYDFYTHDGGYYGGMDVWGQGTLVTVSS

SEQ ID NO: 158 - protein, 130 aa, Artificial Sequence
  Description of Artificial Sequence: Synthetic polypeptide
EVQLVESGGGLVQPGGSLRLSCAASGFTFSDYAMHWVRQAPGKGLEWVSVISYDGGITYYADSVKGRFTISRDNSKNTLYLQMNSLRAEDTAVYYCARGEDYRYSFYGYYYYKYFPMDVWGQGTLVTVSS

SEQ ID NO: 159 - protein, 114 aa, Artificial Sequence
  Description of Artificial Sequence: Synthetic polypeptide
EVQLVESGGGLVQPGGSLRLSCAASGFTFSSYYMSWVRQAPGKGLEWVSYADSVKGRFTISRDNSKNTLYLQMNSLRAEDTAVYYCARATSRWGPYYRQGFDYWGQGTLVTVSS

SEQ ID NO: 160 - protein, 127 aa, Artificial Sequence
  Description of Artificial Sequence: Synthetic polypeptide
EVQLVESGGGLVQPGGSLRLSCAASGFTFSNYYMHWVRQAPGKGLEWVSYISPSGGEKYYADSVKGRFTISRDNSKNTLYLQMNSLRAEDTAVYYCARPRGLYSVYTNDHARGLDYWGQGTLVTVSS

SEQ ID NO: 161 - protein, 119 aa, Artificial Sequence
  Description of Artificial Sequence: Synthetic polypeptide
EVQLVESGGGLVQPGGSLRLSCAASGFTFSSYAMSWVRQAPGKGLEWVAVISYNGGNTYYPDSVKGRFTISRDNSKNTLYLQMNSLRAEDTAVYYCARGDDNNYAFDYWGQGTLVTVSS

SEQ ID NO: 162 - protein, 119 aa, Artificial Sequence
  Description of Artificial Sequence: Synthetic polypeptide
EVQLVESGGGLVQPGGSLRLSCAASGFTFSNYAMHWVRQAPGKGLEWVAYISYSGGNTYYPDSVKGRFTISRDNSKNTLYLQMNSLRAEDTAVYYCARDDRNGFPFDYWGQGTLVTVSS

SEQ ID NO: 163 - protein, 119 aa, Artificial Sequence
  Description of Artificial Sequence: Synthetic polypeptide
EVQLVESGGGLVQPGGSLRLSCAASGFTFSSYAMSWVRQAPGKGLEWVAVISPNGGNKYYPDSVKGRFTISRDNSKNTLYLQMNSLRAEDTAVYYCARGLHNWYAFDYWGQGTLVTVSS

SEQ ID NO: 164 - protein, 119 aa, Artificial Sequence
  Description of Artificial Sequence: Synthetic polypeptide
EVQLVESGGGLVQPGGSLRLSCAASGFTFSNYGMHWVRQAPGKGLEWVSVISYSGGITYYADSVKGRFTISRDNSKNTLYLQMNSLRAEDTAVYYCARIRDNYFPFDYWGQGTLVTVSS

SEQ ID NO: 165 - protein, 127 aa, Artificial Sequence
  Description of Artificial Sequence: Synthetic polypeptide
EVQLVESGGGLVQPGGSLRLSCAASGFTFSNYWMHWVRQAPGKGLEWVAYISYDGSNTYYPDSVKGRFTISRDNSKNTLYLQMNSLRAEDTAVYYCARIRHLFGFSTQDHARGFDVWGQGTLVTVSS

SEQ ID NO: 166 - protein, 130 aa, Artificial Sequence
  Description of Artificial Sequence: Synthetic polypeptide
EVQLVESGGGLVQPGGSLRLSCAASGFTFSDYGMSWVRQAPGKGLEWVSVISYNGGNKYYPDSVKGRFTISRDNSKNTLYLQMNSLRAEDTAVYYCARDELYRGSGWGYYGYYGYPMDVWGQGTLVTVSS

SEQ ID NO: 167 - protein, 119 aa, Artificial Sequence
  Description of Artificial Sequence: Synthetic polypeptide
EVQLVESGGGLVQPGGSLRLSCAASGFTFSNYWMSWVRQAPGKGLEWVSVISPNGGITYYADSVKGRFTISRDNSKNTLYLQMNSLRAEDTAVYYCARHDDNNFGFDYWGQGTLVTVSS

SEQ ID NO: 168 - protein, 119 aa, Artificial Sequence
  Description of Artificial Sequence: Synthetic polypeptide
EVQLVQSGAEVKKPGSSVKVSCKASGGTFSSYWMSWVRQAPGQGLEWIGTIRPGNGETYYNQKFKGRVTITRDTSTSTVYMELSSLRSEDTAVYYCARGYSYAAYLDYWGQGTLVTVSS

SEQ ID NO: 169 - protein, 119 aa, Artificial Sequence
  Description of Artificial Sequence: Synthetic polypeptide
EVQLVESGGGLVQPGGSLRLSCAASGFTFSNYGMSWVRQAPGKGLEWVAVISPSGGIKYYPDSVKGRFTISRDNSKNTLYLQMNSLRAEDTAVYYCARIRHGNYAFDYWGQGTLVTVSS

SEQ ID NO: 170 - protein, 119 aa, Artificial Sequence
  Description of Artificial Sequence: Synthetic polypeptide
EVQLVESGGGLVQPGGSLRLSCAASGFTFSNYAMSWDRQAPGKGLEWVSYISYNGGITYYPDSVKGRFTISRDNSKNTLYLQMNSLRAEDTAVYYCARGRRGNDPFDYWGQGTLVTVSS

SEQ ID NO: 171 - protein, 123 aa, Artificial Sequence
  Description of Artificial Sequence: Synthetic polypeptide
EVQLVQSGAEVKKPGSSVKVSCKASGGTFSSYWMNWVRQAPGQGLEWIGVINPNDGYTKYAQKFKGRVTITRDTSTSTVYMELSSLRSEDTAVYYCARLFISYDDFNTAFDYWGQGTLVTVSS

SEQ ID NO: 172 - protein, 124 aa, Artificial Sequence
  Description of Artificial Sequence: Synthetic polypeptide
EVQLVESGGGLVQPGGSLRLSCAASGFTFSDYYMSWVRQAPGKGLEWVSVISYDGSNTYYPDSVKGRFTISRDNSKNTLYLQMNSLRAEDTAVYYCARGTQRRTDLHTYPFDYWGQGTLVTVSS

SEQ ID NO: 173 - protein, 124 aa, Artificial Sequence
  Description of Artificial Sequence: Synthetic polypeptide
EVQLVESGGGLVQPGGSLRLSCAASGFTFSSYWMHWVRQAPGKGLEWVAYISPSGSETYYPDSVKGRFTISRDNSKNTLYLQMNSLRAEDTAVYYCARDPSRWTGWYRYPFDYWGQGTLVTVSS

SEQ ID NO: 174 - protein, 119 aa, Artificial Sequence
  Description of Artificial Sequence: Synthetic polypeptide
EVQLVESGGGLVQPGGSLRLSCAASGFTFSDYGMGWVRQAPGKGLEWVSYISPSGSEKYYPDSVKGRFTISRDNSKNTLYLQMNSLRAEDTAVYYCARIDRDYFAFDYWGQGTLVTVSS

SEQ ID NO: 175 - protein, 123 aa, Artificial Sequence
  Description of Artificial Sequence: Synthetic polypeptide
EVQLVQSGAEVKKPGSSVKVSCKASGGTFSNYWMSWVRQAPGQGLEWIGTIRPNDGETKYNDKFKGRVTITRDTSTSTVYMELSSLRSEDTAVYYCARSTSYYYNYATWFAYWGQGTLVTVSS

SEQ ID NO: 176 - protein, 122 aa, Artificial Sequence
  Description of Artificial Sequence: Synthetic polypeptide
EVQLVQSGAEVKKPGSSVKVSCKASGGTFSSYAMSWVRQAPGQGLEWIGVIRPNNGYTHYADKFKGRVTITRDTSTSTVYMELSSLRSEDTAVYYCARDYYWYFVYSAIDYWGQGTLVTVSS

SEQ ID NO: 177 - protein, 124 aa, Artificial Sequence
  Description of Artificial Sequence: Synthetic polypeptide
EVQLVESGGGLVQPGGSLRLSCAASGFTFSSYYMHWVRQAPGKGLEWVSVISPDGGETYYPDSVKGRFTISRDNSKNTLYLQMNSLRAEDTAVYYCARDRDDRGILWTYNFDYWGQGTLVTVSS

SEQ ID NO: 178 - protein, 127 aa, Artificial Sequence
  Description of Artificial Sequence: Synthetic polypeptide
EVQLVESGGGLVQPGGSLRLSCAASGFTFSDYWMHWVRQAPGKGLEWVAYISYDGGITYYADSVKGRFTISRDNSKNTLYLQMNSLRAEDTAVYYCARIFVLFSLTGQNYYRTLDYWGQGTLVTVSS

SEQ ID NO: 179 - protein, 124 aa, Artificial Sequence
  Description of Artificial Sequence: Synthetic polypeptide
EVQLVESGGGLVQPGGSLRLSCAASGFTFSNYGMHWVRQAPGKGLEWVAYISYDGGNKYYPDSVKGRFTISRDNSKNTLYLQMNSLRAEDTAVYYCARDDSDWTSLLRFNFDYWGQGTLVTVSS

SEQ ID NO: 180 - protein, 119 aa, Artificial Sequence
  Description of Artificial Sequence: Synthetic polypeptide
EVQLVESGGGLVQPGGSLRLSCAASGFTFSNYWMDWVRQAPGKGLEWVSVISYDGSNTYYPDSVKGRFTISRDNSKNTLYLQMNSLRAEDTAVYYCARHDRDGYAFDYWGQGTLVTVSS

SEQ ID NO: 181 - protein, 123 aa, Artificial Sequence
  Description of Artificial Sequence: Synthetic polypeptide
EVQLVQSGAEVKKPGSSVKVSCKASGGTFSNYAMNWVRQAPGQGLEWIGVIRPGNGYTYYNQKFKGRVTITRDTSTSTVYMELSSLRSEDTAVYYCARLTSRFYNFQYYFAYWGQGTLVTVSS

SEQ ID NO: 182 - protein, 130 aa, Artificial Sequence
  Description of Artificial Sequence: Synthetic polypeptide
EVQLVESGGGLVQPGGSLRLSCAASGFTFSDYAMHWVRQAPGKGLEWVSYISYSGSNKYYADSVKGRFTISRDNSKNTLYLQMNSLRAEDTAVYYCARGELYYYSGSYYDYGYYYGMDVWGQGTLVTVSS

SEQ ID NO: 183 - protein, 122 aa, Artificial Sequence
  Description of Artificial Sequence: Synthetic polypeptide
EVQLVQSGAEVKKPGSSVKVSCKASGGTFSSYYMSWVRQAPGQGLEWIGVIRPNDGETYYAQKFKGRVTITRDTSTSTVYMELSSLRSEDTAVYYCARDEYSYTYGYYMDYWGQGTLVTVSS

SEQ ID NO: 184 - protein, 119 aa, Artificial Sequence
  Description of Artificial Sequence: Synthetic polypeptide
EVQLVESGGGLVQPGGSLRLSCAASGFTFSSYAMGWVRQAPGKGLEWVAVISYSGSNKYYADSVKGRFTISRDNSKNTLYLQMNSLRAEDTAVYYCARHLHDNFAFDYWGQGTLVTVSS

SEQ ID NO: 185 - protein, 127 aa, Artificial Sequence
  Description of Artificial Sequence: Synthetic polypeptide
EVQLVESGGGLVQPGGSLRLSCAASGFTFSSYWMSWVRQAPGKGLEWVAYISPDGGIKYYPDSVKGRFTISRDNSKNTLYLQMNSLRAEDTAVYYCARRVVLFDLTGYDYAYTFDYWGQGTLVTVSS

SEQ ID NO: 186 - protein, 130 aa, Artificial Sequence
  Description of Artificial Sequence: Synthetic polypeptide
EVQLVESGGGLVQPGGSLRLSCAASGFTFSSYWMGWVRQAPGKGLEWVAYISYDGGNTYYADSVKGRFTISRDNSKNTLYLQMNSLRAEDTAVYYCARGEDNRYISSGYDYYYHGPMDVWGQGTLVTVSS

SEQ ID NO: 187 - protein, 127 aa, Artificial Sequence
  Description of Artificial Sequence: Synthetic polypeptide
EVQLVQSGAEVKKPGSSVKVSCKASGGTFSNYWMSWVRQAPGQGLEWIGTIRPNNGETHYNQKFKGRVTITRDTSTSTVYMELSSLRSEDTAVYYCARHSRPYDTSYTYFGFAMDYWGQGTLVTVSS

SEQ ID NO: 188 - protein, 123 aa, Artificial Sequence
  Description of Artificial Sequence: Synthetic polypeptide
EVQLVQSGAEVKKPGSSVKVSCKASGGTFSNYYMNWVRQAPGQGLEWIGRIRLNNGYTKYNQKFKGRVTITRDTSTSTVYMELSSLRSEDTAVYYCARLPFGSGYSSTAFDYWGHGTLVTVSS

SEQ ID NO: 189 - protein, 127 aa, Artificial Sequence
  Description of Artificial Sequence: Synthetic polypeptide
EVQLVQSGAEVKKPGSSVKVSCKASGGTFSSYYMSWVRQAPGQGLEWIGTIRPNDGYTKYNDKFKGRVTITRDTSTSTVYMELSSLRSEDTAVYYCARHSEPSDVSITSFPYTFDYWGQGTLVTVSS

SEQ ID NO: 190 - protein, 122 aa, Artificial Sequence
  Description of Artificial Sequence: Synthetic polypeptide
EVQLVQSGAEVKKPGSSVKVSCKASGGTFSSYAMNWVRQAPGQGLEWIGRINPNDGYTYYAQKFKGRVTITRDTSTSTVYMELSSLRSEDTAVYYCARHGSPNTYYYYMDYWGQGTLVTVSS

SEQ ID NO: 191 - protein, 119 aa, Artificial Sequence
  Description of Artificial Sequence: Synthetic polypeptide
EVQLVQSGAEVKKPGSSVKVSCKASGGTFSNYWMSWVRQAPGQGLEWIGTIRPNNGETKYNDKFKGRVTITRDTSTSTVYMELSSLRSEDTAVYYCARGYGSGAAFDYWGQGTLVTVSS

SEQ ID NO: 192 - protein, 130 aa, Artificial Sequence
  Description of Artificial Sequence: Synthetic polypeptide
EVQLVESGGGLVQPGGSLRLSCAASGFTFSDYWMGWVRQAPGKGLEWVSVISPSGSETYYPDSVKGRFTISRDNSKNTLYLQMNSLRAEDTAVYYCARDEDHYYIFWGHNYHYHRPMDVWGQGTLVTVSS

SEQ ID NO: 193 - protein, 122 aa, Artificial Sequence
  Description of Artificial Sequence: Synthetic polypeptide
EVQLVQSGAEVKKPGSSVKVSCKASGGTFSNYWMSWVRQAPGQGLEWIGVINPGDGYTKYNQKFKGRVTITRDTSTSTVYMELSSLRSEDTAVYYCARDYSWHDYLNYMDYWGQGTLVTVSS

SEQ ID NO: 194 - protein, 130 aa, Artificial Sequence
  Description of Artificial Sequence: Synthetic polypeptide
EVQLVESGGGLVQPGGSLRLSCAASGFTFSNYAMSWVRQAPGKGLEWVSVISPNGGNKYYPDSVKGRFTISRDNSKNTLYLQMNSLRAEDTAVYYCARDEGHYYSGWTFNHHKYGGMDVWGQGTLVTVSS

SEQ ID NO: 195 - protein, 127 aa, Artificial Sequence
  Description of Artificial Sequence: Synthetic polypeptide
EVQLVESGGGLVQPGGSLRLSCAASGFTFSNYGMSWVRQAPGKGLEWVSYISYSGGNTYYPDSVKGRFTISRDNSKNTLYLQMNSLRAEDTAVYYCARIDVWDSFWGYDHARGLDVWGQGTLVTVSS

SEQ ID NO: 196 - protein, 123 aa, Artificial Sequence
  Description of Artificial Sequence: Synthetic polypeptide
EVQLVQSGAEVKKPGSSVKVSCKASGGTFSDYAMNWVRQAPGQGLEWIGRIRPGDGETHYNQKFKGRVTITRDTSTSTVYMELSSLRSEDTAVYYCARHFGRFTVFQGGFAYWGQGTLVTVSS

SEQ ID NO: 197 - protein, 122 aa, Artificial Sequence
  Description of Artificial Sequence: Synthetic polypeptide
EVQLVQSGAEVKKPGSSVKVSCKASGGTFSDYAMHWVRQAPGQGLEWIGTINPGDGYTKYADKFKGRVTITRDTSTSTVYMELSSLRSEDTAVYYCARLYSSNFGYSAMDYWGQGTLVTVSS

SEQ ID NO: 198 - protein, 130 aa, Artificial Sequence
  Description of Artificial Sequence: Synthetic polypeptide
EVQLVESGGGLVQPGGSLRLSCAASGFTFSSYGMHWVRQAPGKGLEWVSVISYNGGEKYYADSVKGRFTISRDNSKNTLYLQMNSLRAEDTAVYYCARDEGHRGDSLRFDFHKHFPMDVWGQGTLVTVSS

SEQ ID NO: 199 - protein, 128 aa, Artificial Sequence
  Description of Artificial Sequence: Synthetic polypeptide
EVQLVESGGGLVQPGGSLRLSCAASGSTISDRAMGWFRQAPGKEREMVAAIIGDATNYADSVKGRFTISADNSKNTAYLQMNSLKPEDTAVYYCARALQYCSPTSCYVDDYFYYMDVWGQGTLVTVSS

SEQ ID NO: 200 - protein, 125 aa, Artificial Sequence
  Description of Artificial Sequence: Synthetic polypeptide
EVQLVESGGGLVQPGGSLRLSCAASGFTFSTYWMGWFRQAPGKERELVAAISGSGSITNYADSVKGRFTISADNSKNTAYLQMNSLKPEDTAVYYCARGPEWTPPGDYFYYMDDWGQGTLVTVSS

SEQ ID NO: 201 - protein, 115 aa, Artificial Sequence
  Description of Artificial Sequence: Synthetic polypeptide
EVQLVESGGGLVQPGGSLRLSCAASGFSLDDYGMGWFRQAPGKEREGVAAIGSDGSTSYADSVKGHFTISADNSKNTAYLQMNSLKPEDTAVYYCGTWFGDYNFWGQGTLVTVSS

SEQ ID NO: 202 - protein, 117 aa, Artificial Sequence
  Description of Artificial Sequence: Synthetic polypeptide
EVQLVESGGGLVQPGGSLRLSCAASGRGFSRYAMGWFRQAPGKEREFVAAITPINWGGRGTTVYADSVKGRFTISADNSKNTAYLQMNSLKPEDTAVYYCASDPPGWGQGTLVTVSS

SEQ ID NO: 203 - protein, 114 aa, Artificial Sequence
  Description of Artificial Sequence: Synthetic polypeptide
EVQLVESGGGLVQPGGSLRLSCAASGNIAAINVMGWFRQAPGKEREFVAAISWSSGSTAYADSVKGRFTISADNSKNTAYLQMNSLKPEDTAVYYCVRDRGGLWGQGTLVTVSS

SEQ ID NO: 204 - protein, 126 aa, Artificial Sequence
  Description of Artificial Sequence: Synthetic polypeptide
EVQLVESGGGLVQPGGSLRLSCAASDLSFSFYTMGWFRQAPGKERELVATINWSGTPVYADSVKGRFTISADNSKNTAYLQMNSLKPEDTAVYYCAREDDYYDGTGYYQYYGMDVWGQGTLVTVSS

SEQ ID NO: 205 - protein, 114 aa, Artificial Sequence
  Description of Artificial Sequence: Synthetic polypeptide
EVQLVESGGGLVQPGGSLRLSCAASGFTVSNYAMGWFRQAPGKEREFVAAIRWSGGITWYADSVKGRFTISADNSKNTAYLQMNSLKPEDTAVYYCVRDRGGSWGQGTLVTVSS

SEQ ID NO: 206 - protein, 121 aa, Artificial Sequence
  Description of Artificial Sequence: Synthetic polypeptide
EVQLVESGGGLVQPGGSLRLSCAASGFTLDYYAMGWFRQAPGKERELVAAINWSGDTIYYADSVKGRFTISADNSKNTAYLQMNSLKPEDTAVYYCAREGCSSTSCYLDPWGQGTLVTVSS

SEQ ID NO: 207 - protein, 118 aa, Artificial Sequence
  Description of Artificial Sequence: Synthetic polypeptide
EVQLVESGGGLVQPGGSLRLSCAASGFTFSTYWMGWFRQAPGKERELVAAISGSGSITNYADSVKGRFTISADNSKNTAYLQMNSLKPEDTAVYYCVLTLSPYAMDVWGQGTLVTVSS

SEQ ID NO: 208 - protein, 126 aa, Artificial Sequence
  Description of Artificial Sequence: Synthetic polypeptide
EVQLVESGGGLVQPGGSLRLSCAASGFSFDDDYVMGWFRQAPGKEREFVSAIDWNGNSTYYADSVKGRFTISADNSKNTAYLQMNSLKPEDTAVYYCARGPEWTPPGDYFYYMDDWGQGTLVTVSS

SEQ ID NO: 209 - protein, 120 aa, Artificial Sequence
  Description of Artificial Sequence: Synthetic polypeptide
EVQLVESGGGLVQPGGSLRLSCAASGGTFSIYAMGWFRQAPGKEREFVAAISTHSITVYADSVKGRFTISADNSKNTAYLQMNSLKPEDTAVYYCATYLEMSPGEYFDNWGQGTLVTVSS

SEQ ID NO: 210 - protein, 119 aa, Artificial Sequence
  Description of Artificial Sequence: Synthetic polypeptide
EVQLVESGGGLVQPGGSLRLSCAASGFTFSTYWMGWFRQAPGKERELVAAISGSGSITNYADSVKGRFTISADNSKNTAYLQMNSLKPEDTAVYYCASYWRTGDWFDPWGQGTLVTVSS

SEQ ID NO: 211 - protein, 120 aa, Artificial Sequence
  Description of Artificial Sequence: Synthetic polypeptide
EVQLVESGGGLVQPGGSLRLSCAASGITFRRYIMGWFRQAPGKEREFVAAISSSGALTSYADSVKGRFTISADNSKNTAYLQMNSLKPEDTAVYYCAKDRTGSGWFRDVWGQGTLVTVSS

SEQ ID NO: 212 - protein, 119 aa, Artificial Sequence
  Description of Artificial Sequence: Synthetic polypeptide
EVQLVESGGGLVQPGGSLRLSCAASGIPSIRAMGWFRQAPGKERELVAGISRSGETTWYADSVKGRFTISADNSKNTAYLQMNSLKPEDTAVYYCVKSGLDDGYYPEDWGQGTLVTVSS

SEQ ID NO: 213 - protein, 113 aa, Artificial Sequence
  Description of Artificial Sequence: Synthetic polypeptide
EVQLVESGGGLVQPGGSLRLSCAASGSIDSIHVMGWFRQAPGKEREFVAAISWTGGSTAYADSVKGRFTISADNSKNTAYLQMNSLKPEDTAVYYCASDPPGWGQGTLVTVSS

SEQ ID NO: 214 - protein, 111 aa, Artificial Sequence
  Description of Artificial Sequence: Synthetic polypeptide
EVQLVESGGGLVQPGGSLRLSCAASGSTISDRAMGWFRQAPGKEREMVAAIIGDATNYADSVKGRFTISADNSKNTAYLQMNSLKPEDTAVYYCTTDMGGWGQGTLVTVSS

SEQ ID NO: 215 - protein, 119 aa, Artificial Sequence
  Description of Artificial Sequence: Synthetic polypeptide
EVQLVESGGGLVQPGGSLRLSCAASGMTTIGPMGWFRQAPGKEREMVAAISWSGGLTYYADSVKGRFTISADNSKNTAYLQMNSLKPEDTAVYYCARVYYDSSGYNDYWGQGTLVTVSS

SEQ ID NO: 216 - protein, 123 aa, Artificial Sequence
  Description of Artificial Sequence: Synthetic polypeptide
EVQLVESGGGLVQPGGSLRLSCAASGSTISDRAMGWFRQAPGKEREMVAAIIGDATNYADSVKGRFTISADNSKNTAYLQMNSLKPEDTAVYYCARGPEWTPPGDYFYYMDDWGQGTLVTVSS

SEQ ID NO: 217 - protein, 117 aa, Artificial Sequence
  Description of Artificial Sequence: Synthetic polypeptide
EVQLVESGGGLVQPGGSLRLSCAASGSIDSIHVMGWFRQAPGKEREFVAAISWTGGSTAYADSVKGRFTISADNSKNTAYLQMNSLKPEDTAVYYCVAGMVRGVDFWGQGTLVTVSS

SEQ ID NO: 218 - protein, 122 aa, Artificial Sequence
  Description of Artificial Sequence: Synthetic polypeptide
EVQLVESGGGLVQPGGSLRLSCAASGRTFSDYAMGWFRQAPGKEREFVAVVNWNGDSTYYADSVKGRFTISADNSKNTAYLQMNSLKPEDTAVYYCARLFAQYSDYDYVAEWGQGTLVTVSS

SEQ ID NO: 219 - protein, 115 aa, Artificial Sequence
  Description of Artificial Sequence: Synthetic polypeptide
EVQLVESGGGLVQPGGSLRLSCAASGRTFFSYPMGWFRQAPGKEREFVAAIRWSGGSTYYADSVKGRFTISADNSKNTAYLQMNSLKPEDTAVYYCASGRPVPRWGQGTLVTVSS

SEQ ID NO: 220 - protein, 127 aa, Artificial Sequence
  Description of Artificial Sequence: Synthetic polypeptide
EVQLVESGGGLVQPGGSLRLSCAASGNIFRIETMGWFRQAPGKEREFVATIHSSGSTYYADSVKGRFTISADNSKNTAYLQMNSLKPEDTAVYYCARSDYDVVSGLTNDYLYYLDDWGQGTLVTVSS

SEQ ID NO: 221 - protein, 128 aa, Artificial Sequence
  Description of Artificial Sequence: Synthetic polypeptide
EVQLVESGGGLVQPGGSLRLSCAASGFNFDDYAMGWFRQAPGKEREWVSEISSGGNKDYADSVKGRFTISADNSKNTAYLQMNSLKPEDTAVYYCARTSYYYSSGSSFSGRLDYLDDWGQGTLVTVSS

SEQ ID NO: 222 - protein, 116 aa, Artificial Sequence
  Description of Artificial Sequence: Synthetic polypeptide
EVQLVESGGGLVQPGGSLRLSCAASGFPFSEYPMGWFRQAPGKERELVAGIAWGDGITYYADSVKGRFTISADNSKNTAYLQMNSLKPEDTAVYYCITIFVGMDVWGQGTLVTVSS

SEQ ID NO: 223 - protein, 120 aa, Artificial Sequence
  Description of Artificial Sequence: Synthetic polypeptide
EVQLVESGGGLVQPGGSLRLSCAASGFPFDDYAMGWFRQAPGKERELVAAITRSGKTTYYADSVKGRFTISADNSKNTAYLQMNSLKPEDTAVYYCARVYYDSSGYNDYWGQGTLVTVSS

SEQ ID NO: 224 - protein, 121 aa, Artificial Sequence
  Description of Artificial Sequence: Synthetic polypeptide
EVQLVESGGGLVQPGGSLRLSCAASGFPFDDYAMGWFRQAPGKEREFVAAISWSAGSTYYADSVKGRFTISADNSKNTAYLQMNSLKPEDTAVYYCARVRDFWGGYDIDHWGQGTLVTVSS

SEQ ID NO: 225 - protein, 115 aa, Artificial Sequence
  Description of Artificial Sequence: Synthetic polypeptide
EVQLVESGGGLVQPGGSLRLSCAASGFNLDDYADMGWFRQAPGKEREFVAAVTWSGGLTSYADSVKGRFTISADNSKNTAYLQMNSLKPEDTAVYYCVRDRGGSWGQGTLVTVSS

SEQ ID NO: 226 - protein, 125 aa, Artificial Sequence
  Description of Artificial Sequence: Synthetic polypeptide
EVQLVESGGGLVQPGGSLRLSCAASGFGIDAMGWFRQAPGKEREFVAAISWSGDSTYYADSVKGRFTISADNSKNTAYLQMNSLKPEDTAVYYCARAGGPYYDLSTGSSGHLDYWGQGTLVTVSS

SEQ ID NO: 227 - protein, 126 aa, Artificial Sequence
  Description of Artificial Sequence: Synthetic polypeptide
EVQLVESGGGLVQPGGSLRLSCAASGFDFDNFDDYAMGWFRQAPGKEREFVAAINRSGDTTYYADSVKGRFTISADNSKNTAYLQMNSLKPEDTAVYYCAKAGPNYYDSDTRGDYWGQGTLVTVSS

SEQ ID NO: 228 - protein, 118 aa, Artificial Sequence
  Description of Artificial Sequence: Synthetic polypeptide
EVQLVESGGGLVQPGGSLRLSCAASGFNFDDYAMGWFRQAPGKEREVVASISTDVDSKYYADSVKGRFTISADNSKNTAYLQMNSLKPEDTAVYYCARAEGYWYFDLWGQGTLVTVSS

SEQ ID NO: 229 - protein, 128 aa, Artificial Sequence
  Description of Artificial Sequence: Synthetic polypeptide
EVQLVESGGGLVQPGGSLRLSCAASGFGFGSYDMGWFRQAPGKEREGVSCFTSSDGRTFYADSVKGRFTISADNSKNTAYLQMNSLKPEDTAVYYCARAPYTSVAGRAYYYYYGMDVWGQGTLVTVSS

SEQ ID NO: 230 - protein, 119 aa, Artificial Sequence
  Description of Artificial Sequence: Synthetic polypeptide
EVQLVESGGGLVQPGGSLRLSCAASGFDFDNFDDYAMGWFRQAPGKEREFVAAINRSGDTTYYADSVKGRFTISADNSKNTAYLQMNSLKPEDTAVYYCGTWFGDYNFWGQGTLVTVSS

SEQ ID NO: 231 - protein, 124 aa, Artificial Sequence
  Description of Artificial Sequence: Synthetic polypeptide
EVQLVESGGGLVQPGGSLRLSCAASGFPFSIWPMGWFRQAPGKEREFVAAIRWSGASTVYADSVKGRFTISADNSKNTAYLQMNSLKPEDTAVYYCARLDILGGPDTVGAFDLWGQGTLVTVSS

SEQ ID NO: 232 - protein, 113 aa, Artificial Sequence
  Description of Artificial Sequence: Synthetic polypeptide
EVQLVESGGGLVQPGGSLRLSCAASGFPFSEYPMGWFRQAPGKERELVAGIAWGDGITYYADSVKGRFTISADNSKNTAYLQMNSLKPEDTAVYYCTTDMGGWGQGTLVTVSS

SEQ ID NO: 233 - protein, 121 aa, Artificial Sequence
  Description of Artificial Sequence: Synthetic polypeptide
EVQLVESGGGLVQPGGSLRLSCAASGFSFDDYAMGWFRQAPGKERELVAAVRWSGGITWYADSVKGRFTISADNSKNTAYLQMNSLKPEDTAVYYCVRVARDRGYNYDSDWGQGTLVTVSS

SEQ ID NO: 234 - protein, 120 aa, Artificial Sequence
  Description of Artificial Sequence: Synthetic polypeptide
EVQLVESGGGLVQPGGSLRLSCAASGFPLDDYAMGWFRQAPGKERELVAGIAWGDGSTYYADSVKGRFTISADNSKNTAYLQMNSLKPEDTAVYYCARTFKTGYRSGYYWGQGTLVTVSS

SEQ ID NO: 235 - protein, 121 aa, Artificial Sequence
  Description of Artificial Sequence: Synthetic polypeptide
EVQLVESGGGLVQPGGSLRLSCAASGFPLDDYAMGWFRQAPGKERELVAGISSEGTTYYADSVKGRFTISADNSKNTAYLQMNSLKPEDTAVYYCVTDQSAYGQTVFFDSWGQGTLVTVSS

SEQ ID NO: 236 - protein, 121 aa, Artificial Sequence
  Description of Artificial Sequence: Synthetic polypeptide
EVQLVESGGGLVQPGGSLRLSCAASGFPLDYYGMGWFRQAPGKERELVAAISRSGGSTYYADSVKGRFTISADNSKNTAYLQMNSLKPEDTAVYYCARDPDDYGDYTFDYWGQGTLVTVSS

SEQ ID NO: 237 - protein, 118 aa, Artificial Sequence
  Description of Artificial Sequence: Synthetic polypeptide
EVQLVESGGGLVQPGGSLRLSCAASGFSFDDDYVMGWFRQAPGKEREFVAAISRSGGDTFYADSVKGRFTISADNSKNTAYLQMNSLKPEDTAVYYCVAGMVRGVDFWGQGTLVTVSS

SEQ ID NO: 238 - protein, 121 aa, Artificial Sequence
  Description of Artificial Sequence: Synthetic polypeptide
EVQLVESGGGLVQPGGSLRLSCAASGFSFDDDYVMGWFRQAPGKEREFVSAIDWNGNSTYYADSVKGRFTISADNSKNTAYLQMNSLKPEDTAVYYCAGWIHMKGGFLDYWGQGTLVTVSS

SEQ ID NO: 239 - protein, 121 aa, Artificial Sequence
  Description of Artificial Sequence: Synthetic polypeptide
EVQLVESGGGLVQPGGSLRLSCAASGFSFDDDYVMGWFRQAPGKEREFVSAIDWNGNSTYYADSVKGRFTISADNSKNTAYLQMNSLKPEDTAVYYCARADCSGGVCNAYWGQGTLVTVSS

SEQ ID NO: 240 - protein, 115 aa, Artificial Sequence
  Description of Artificial Sequence: Synthetic polypeptide
EVQLVESGGGLVQPGGSLRLSCAASGFAFSRYGMGWFRQAPGKERELVAGITPGGNTNYADSVKGRFTISADNSKNTAYLQMNSLKPEDTAVYYCAMTSWGLVYWGQGTLVTVSS

SEQ ID NO: 241 - protein, 128 aa, Artificial Sequence
  Description of Artificial Sequence: Synthetic polypeptide
EVQLVESGGGLVQPGGSLRLSCAASGFSFDDYAMGWFRQAPGKERELVSDISFGGNTNYADSVKGRFTISADNSKNTAYLQMNSLKPEDTAVYYCARTSYYYSSGSSFSGRLDYLDDWGQGTLVTVSS

SEQ ID NO: 242 - protein, 129 aa, Artificial Sequence
  Description of Artificial Sequence: Synthetic polypeptide
EVQLVESGGGLVQPGGSLRLSCAASGFSLDDYGMGWFRQAPGKEREGVAAIGSDGSTSYADSVKGHFTISADNSKNTAYLQMNSLKPEDTAVYYCARALQYCSPTSCYVDDYFYYMDVWGQGTLVTVSS

SEQ ID NO: 243 - protein, 119 aa, Artificial Sequence
  Description of Artificial Sequence: Synthetic polypeptide
EVQLVESGGGLVQPGGSLRLSCAASGFSLDDYGMGWFRQAPGKEREGVAAIGSDGSTSYADSVKGRFTISADNSKNTAYLQMNSLKPEDTAVYYCARGFSSGWYGWDSWGQGTLVTVSS

SEQ ID NO: 244 - protein, 116 aa, Artificial Sequence
  Description of Artificial Sequence: Synthetic polypeptide
EVQLVESGGGLVQPGGSLRLSCAASGFSLDDYGMGWFRQAPGKERELVAAISRSGNVTAYADSVKGHFTISADNSKNTAYLQMNSLKPEDTAVYYCGTWFGDYNFWGQGTLVTVSS

SEQ ID NO: 245 - protein, 129 aa, Artificial Sequence
  Description of Artificial Sequence: Synthetic polypeptide
EVQLVESGGGLVQPGGSLRLSCAASGFSLDDYGMGWFRQAPGKEREFVAGVAWSSDFTAYADSVKGRFTISADNSKNTAYLQMNSLKPEDTAVYYCARASPGRYCSGRSCYFDWYFHLWGQGTLVTVSS

SEQ ID NO: 246 - protein, 130 aa, Artificial Sequence
  Description of Artificial Sequence: Synthetic polypeptide
EVQLVESGGGLVQPGGSLRLSCAASGFSLDYYAMGWFRQAPGKEREFVASISWIIGSTYYADSVKGRFTISADNSKNTAYLQMNSLKPEDTAVYYCARALQYCSPTSCYVDDYFYYMDVWGQGTLVTVSS

SEQ ID NO: 247 - protein, 124 aa, Artificial Sequence
  Description of Artificial Sequence: Synthetic polypeptide
EVQLVESGGGLVQPGGSLRLSCAASGFSLDYYAMGWFRQAPGKEREFVASISWIIGSTYYADSVKGRFTISADNSKNTAYLQMNSLKPEDTAVYYCARVNPSDYYDSRGYPDYWGQGTLVTVSS

SEQ ID NO: 248 - protein, 116 aa, Artificial Sequence
  Description of Artificial Sequence: Synthetic polypeptide
EVQLVESGGGLVQPGGSLRLSCAASGFAFSTASMGWFRQAPGKEREFVAAITRGSTYYADSVKGRFTISADNSKNTAYLQMNSLKPEDTAVYYCVLTLSPYAMDVWGQGTLVTVSS

SEQ ID NO: 249 - protein, 120 aa, Artificial Sequence
  Description of Artificial Sequence: Synthetic polypeptide
EVQLVESGGGLVQPGGSLRLSCAASGDTFNWYAMGWFRQAPGKERELVATITADGITNYADSVKGRFTISADNSKNTAYLQMNSLKPEDTAVYYCARDREAYSYGYNDYWGQGTLVTVSS

SEQ ID NO: 250 - protein, 121 aa, Artificial Sequence
  Description of Artificial Sequence: Synthetic polypeptide
EVQLVESGGGLVQPGGSLRLSCAASGFAFDDYAMGWFRQAPGKEREIVAAIRWSGGITWYADSVKGRFTISADNSKNTAYLQMNSLKPEDTAVYYCATEETLQQLLRAYCWGQGTLVTVSS

SEQ ID NO: 251 - protein, 120 aa, Artificial Sequence
  Description of Artificial Sequence: Synthetic polypeptide
EVQLVESGGGLVQPGGSLRLSCAASGFTDDYYAMGWFRQAPGKEREFVAAISWSGGSTYYADSVKGRFTISADNSKNTAYLQMNSLKPEDTAVYYCARGPYGGASYFTVWGQGTLVTVSS

SEQ ID NO: 252 - protein, 120 aa, Artificial Sequence
  Description of Artificial Sequence: Synthetic polypeptide
EVQLVESGGGLVQPGGSLRLSCAASGFTFENYAMGWFRQAPGKEREFVAAINWNGASTDYADSVKGRFTISADNSKNTAYLQMNSLKPEDTAVYYCARDHPNYYYGMDVWGQGTLVTVSS

SEQ ID NO: 253 - protein, 129 aa, Artificial Sequence
  Description of Artificial Sequence: Synthetic polypeptide
EVQLVESGGGLVQPGGSLRLSCAASGFTFSTHWMGWFRQAPGKERELLAEIYPSGSYYADSVKGRFTISADNSKNTAYLQMNSLKPEDTAVYYCAREGPRVDLNYDFWSPDYYYYMDVWGQGTLVTVSS

SEQ ID NO: 254 - protein, 126 aa, Artificial Sequence
  Description of Artificial Sequence: Synthetic polypeptide
EVQLVESGGGLVQPGGSLRLSCAASDLSFSFYTMGWFRQAPGKERELVAAVTSGGITNYADSVKGRFTISADNSKNTAYLQMNSLKPEDTAVYYCAREDDYYDGTGYYQYYGMDVWGQGTLVTVSS

SEQ ID NO: 255 - protein, 131 aa, Artificial Sequence
  Description of Artificial Sequence: Synthetic polypeptide
EVQLVESGGGLVQPGGSLRLSCAASGRGFSRYAMGWFRQAPGKEREFVAAITPINWGGRGTTVYADSVKGRFTISADNSKNTAYLQMNSLKPEDTAVYYCAREDDYYDGTGYYQYYGMDVWGQGTLVTVSS

SEQ ID NO: 256 - protein, 123 aa, Artificial Sequence
  Description of Artificial Sequence: Synthetic polypeptide
EVQLVESGGGLVQPGGSLRLSCAASGSTFSKAVMGWFRQAPGKEREFVAAISSSGISTIYADSVKGRFTISADNSKNTAYLQMNSLKPEDTAVYYCARGGGPHYYYYYYMDVWGQGTLVTVSS

SEQ ID NO: 257 - protein, 126 aa, Artificial Sequence
  Description of Artificial Sequence: Synthetic polypeptide
EVQLVESGGGLVQPGGSLRLSCAASGSTFSSYRMGWFRQAPGKEREFVSAINYSGGSTYYADSVKGRFTISADNSKNTAYLQMNSLKPEDTAVYYCAREGEYSSSWYYYYYGMDVWGQGTLVTVSS

SEQ ID NO: 258 - protein, 127 aa, Artificial Sequence
  Description of Artificial Sequence: Synthetic polypeptide
EVQLVESGGGLVQPGGSLRLSCAASGYFASWYYMGWFRQAPGKERELVAGVSRGGMTSLGDSTLYADSVKGRFTISADNSKNTAYLQMNSLKPEDTAVYYCARDRPDYYYYYGMDVWGQGTLVTVSS

SEQ ID NO: 259 - protein, 122 aa, Artificial Sequence
  Description of Artificial Sequence: Synthetic polypeptide
EVQLVESGGGLVQPGGSLRLSCAASGCTVSINAMGWFRQAPGKEREFVAAISWSGGSTYYADSVKGRFTISADNSKNTAYLQMNSLKPEDTAVYYCARLFAQYSDYDYVAEWGQGTLVTVSS

SEQ ID NO: 260 - protein, 120 aa, Artificial Sequence
  Description of Artificial Sequence: Synthetic polypeptide
EVQLVESGGGLVQPGGSLRLSCAASGDIFSNYGMGWFRQAPGKEREGVAAIGSDGSTSYADSVKGRFTISADNSKNTAYLQMNSLKPEDTAVYYCATAVGATSDDPFDMWGQGTLVTVSS

SEQ ID NO: 261 - protein, 119 aa, Artificial Sequence
  Description of Artificial Sequence: Synthetic polypeptide
EVQLVESGGGLVQPGGSLRLSCAASGDIGSINAMGWFRQAPGKERELVAAIRWSGGITWYADSVKGRFTISADNSKNTAYLQMNSLKPEDTAVYYCVKSGGNYGDYVVWGQGTLVTVSS

SEQ ID NO: 262 - protein, 123 aa, Artificial Sequence
  Description of Artificial Sequence: Synthetic polypeptide
EVQLVESGGGLVQPGGSLRLSCAASGDIGSINAMGWFRQAPGKEREFVAAITPINWGGRGTTVYADSVKGRFTISADNSKNTAYLQMNSLKPEDTAVYYCVMRGSGVATRVYWGQGTLVTVSS

SEQ ID NO: 263 - protein, 118 aa, Artificial Sequence
  Description of Artificial Sequence: Synthetic polypeptide
EVQLVESGGGLVQPGGSLRLSCAASGDIGSINAMGWFRQAPGKEREFVAAVRWSGGITWYADSVKGRFTISADNSKNTAYLQMNSLKPEDTAVYYCARTRHDYSNVYWGQGTLVTVSS

SEQ ID NO: 264 - protein, 119 aa, Artificial Sequence
  Description of Artificial Sequence: Synthetic polypeptide
EVQLVESGGGLVQPGGSLRLSCAASGDIGSINAMGWFRQAPGKERELVAGISRSGGTTYYADSVKGRFTISADNSKNTAYLQMNSLKPEDTAVYYCLAVTSGADAFDIWGQGTLVTVSS

SEQ ID NO: 265 - protein, 127 aa, Artificial Sequence
  Description of Artificial Sequence: Synthetic polypeptide
EVQLVESGGGLVQPGGSLRLSCAASGDISSIVAMGWFRQAPGKERELVAAIRWSEDRVWYADSVKGRFTISADNSKNTAYLQMNSLKPEDTAVYYCARDQGREDDFWSGYDEPRDVWGQGTLVTVSS

SEQ ID NO: 266 - protein, 120 aa, Artificial Sequence
  Description of Artificial Sequence: Synthetic polypeptide
EVQLVESGGGLVQPGGSLRLSCAASGDISSIVAMGWFRQAPGKERELVAAIRWSEDRVWYADSVKGRFTISADNSKNTAYLQMNSLKPEDTAVYYCARTFKTGYRSGYYWGQGTLVTVSS

SEQ ID NO: 267 - protein, 121 aa, Artificial Sequence
  Description of Artificial Sequence: Synthetic polypeptide
EVQLVESGGGLVQPGGSLRLSCAASGDTFNWYAMGWFRQAPGKEREIVAAIDWSGSSTYYADSVKGRFTISADNSKNTAYLQMNSLKPEDTAVYYCANLEFNYYDSRQLRWGQGTLVTVSS

SEQ ID NO: 268 - protein, 120 aa, Artificial Sequence
  Description of Artificial Sequence: Synthetic polypeptide
EVQLVESGGGLVQPGGSLRLSCAASGDTFNWYAMGWFRQAPGKEREIVAAISRSGDTTYYADSVKGRFTISADNSKNTAYLQMNSLKPEDTAVYYCARASSDYGDVSGPWGQGTLVTVSS

SEQ ID NO: 269 - protein, 121 aa, Artificial Sequence
  Description of Artificial Sequence: Synthetic polypeptide
EVQLVESGGGLVQPGGSLRLSCAASGDTFNWYAMGWFRQAPGKEREIVAAISRSGDTTYYADSVKGRFTISADNSKNTAYLQMNSLKPEDTAVYYCARTGSSSPDSYMDVWGQGTLVTVSS

SEQ ID NO: 270 - protein, 119 aa, Artificial Sequence
  Description of Artificial Sequence: Synthetic polypeptide
EVQLVESGGGLVQPGGSLRLSCAASGDTFNWYAMGWFRQAPGKEREFVAAISRSGSITYYADSVKGRFTISADNSKNTAYLQMNSLKPEDTAVYYCVSDVGNNWYADSWGQGTLVTVSS

SEQ ID NO: 271 - protein, 121 aa, Artificial Sequence
  Description of Artificial Sequence: Synthetic polypeptide
EVQLVESGGGLVQPGGSLRLSCAASGDTFNWYAMGWFRQAPGKEREFVAAISWSEDNTYYADSVKGRFTISADNSKNTAYLQMNSLKPEDTAVYYCVKAAQDYGDSTFDFWGQGTLVTVSS

SEQ ID NO: 272 - protein, 116 aa, Artificial Sequence
  Description of Artificial Sequence: Synthetic polypeptide
EVQLVESGGGLVQPGGSLRLSCAASGDTFNWYAMGWFRQAPGKERELVASITNGGSTSYADSVKGRFTISADNSKNTAYLQMNSLKPEDTAVYYCVGCSGGSCNYWGQGTLVTVSS

SEQ ID NO: 273 - protein, 121 aa, Artificial Sequence
  Description of Artificial Sequence: Synthetic polypeptide
EVQLVESGGGLVQPGGSLRLSCAASGDTFSSYSMGWFRQAPGKEREFVAAVTWSGGITWYADSVKGRFTISADNSKNTAYLQMNSLKPEDTAVYYCARDLYYDSSGYYGGWGQGTLVTVSS

SEQ ID NO: 274 - protein, 120 aa, Artificial Sequence
  Description of Artificial Sequence: Synthetic polypeptide
EVQLVESGGGLVQPGGSLRLSCAASGDTFSWYAMGWFRQAPGKEREFVAAISNSGLSTYYADSVKGRFTISADNSKNTAYLQMNSLKPEDTAVYYCARAYCSGGSCYDYWGQGTLVTVSS

SEQ ID NO: 275 - protein, 120 aa, Artificial Sequence
  Description of Artificial Sequence: Synthetic polypeptide
EVQLVESGGGLVQPGGSLRLSCAASGDTFSWYAMGWFRQAPGKEREFQAAISRSGGTTYYADSVKGRFTISADNSKNTAYLQMNSLKPEDTAVYYCARVMESGYDYLDYWGQGTLVTVSS

SEQ ID NO: 276 - protein, 121 aa, Artificial Sequence
  Description of Artificial Sequence: Synthetic polypeptide
EVQLVESGGGLVQPGGSLRLSCAASGDTFSWYAMGWFRQAPGKEREFVAAISSSGEVTTYADSVKGRFTISADNSKNTAYLQMNSLKPEDTAVYYCARIVLVAVGELTDYWGQGTLVTVSS

SEQ ID NO: 277 - protein, 125 aa, Artificial Sequence
  Description of Artificial Sequence: Synthetic polypeptide
EVQLVESGGGLVQPGGSLRLSCAASGERAFSNYAMGWFRQAPGKERELVAAVTSGGTTYYADSVKGRFTISADNSKNTAYLQMNSLKPEDTAVYYCARGPEWTPPGDYFYYMDDWGQGTLVTVSS

SEQ ID NO: 278 - protein, 125 aa, Artificial Sequence
  Description of Artificial Sequence: Synthetic polypeptide
EVQLVESGGGLVQPGGSLRLSCAASGFSLDYYGMGWFRQAPGKEREFVAAIDWSGGTTYYADSVKGRFTISADNSKNTAYLQMNSLKPEDTAVYYCARGPEWTPPGDYFYYMDDWGQGTLVTVSS

SEQ ID NO: 279 - protein, 122 aa, Artificial Sequence
  Description of Artificial Sequence: Synthetic polypeptide
EVQLVESGGGLVQPGGSLRLSCAASGFTFSTYWMGWFRQAPGKERELVAAISGSGSITNYADSVKGRFTISADNSKNTAYLQMNSLKPEDTAVYYCARDWQSLVRGVSIDQWGQGTLVTVSS

SEQ ID NO: 280 - protein, 124 aa, Artificial Sequence
  Description of Artificial Sequence: Synthetic polypeptide
EVQLVESGGGLVQPGGSLRLSCAASGFTDDYYAMGWFRQAPGKERELVAGIDTSGIVNYADSVKGRFTISADNSKNTAYLQMNSLKPEDTAVYYCARGQLRYFDWLLDYYFDYWGQGTLVTVSS

SEQ ID NO: 281 - protein, 113 aa, Artificial Sequence
  Description of Artificial Sequence: Synthetic polypeptide
EVQLVESGGGLVQPGGSLRLSCAASGFTFSSYPMGWFRQAPGKEREFVAAISSSGVTTIYADSVKGRFTISADNSKNTAYLQMNSLKPEDTAVYYCASDPPGWGQGTLVTVSS

SEQ ID NO: 282 - protein, 116 aa, Artificial Sequence
  Description of Artificial Sequence: Synthetic polypeptide
EVQLVESGGGLVQPGGSLRLSCAASGFTFSTSWMGWFRQAPGKERELVALISMSGDDSAYADSVKGRFTISADNSKNTAYLQMNSLKPEDTAVYYCARGNYYMDVWGQGTLVTVSS

SEQ ID NO: 283 - protein, 112 aa, Artificial Sequence
  Description of Artificial Sequence: Synthetic polypeptide
EVQLVESGGGLVQPGGSLRLSCAASGFTFSTYWMGWFRQAPGKERELVAAINWDSARTYYADSVKGRFTISADNSKNTAYLQMNSLKPEDTAVYYCTTDQHWGQGTLVTVSS

SEQ ID NO: 284 - protein, 125 aa, Artificial Sequence
  Description of Artificial Sequence: Synthetic polypeptide
EVQLVESGGGLVQPGGSLRLSCAASGFTFSTYWMGWFRQAPGKERELVAAISGGGSITNYADSVKGRFTISADNSKNTAYLQMNSLKPEDTAVYYCARGPEWTPPGDYFYYMDDWGQGTLVTVSS

SEQ ID NO: 285 - protein, 124 aa, Artificial Sequence
  Description of Artificial Sequence: Synthetic polypeptide
EVQLVESGGGLVQPGGSLRLSCAASGFTFSTYWMGWFRQAPGKEREMVAAISGSGATNYADSVKGRFTISADNSKNTAYLQMNSLKPEDTAVYYCARGPEWTPPGDYFYYMDVWGQGTLVTVSS

SEQ ID NO: 286 - protein, 116 aa, Artificial Sequence
  Description of Artificial Sequence: Synthetic polypeptide
EVQLVESGGGLVQPGGSLRLSCAASGFTFSTYWMGWFRQAPGKERELVAAISGSGSITNYADSVKGRFTISADNSKNTAYLQMNSLKPEDTAVYYCAGGSYGGYVWGQGTLVTVSS

SEQ ID NO: 287 - protein, 120 aa, Artificial Sequence
  Description of Artificial Sequence: Synthetic polypeptide
QVQLVESGGGLVQPGGSLRLSCAASGFTFSTYWMGWFRQAPGKERELVAAISGSGSITNYADSVKGRFTISADNSKNTAYLQMNSLKPEDTAVYYCAHQYCAAGSCYDKWGQGTLVTVSS

SEQ ID NO: 288 - protein, 118 aa, Artificial Sequence
  Description of Artificial Sequence: Synthetic polypeptide
EVQLVESGGGLVQPGGSLRLSCAASGFTFSTYWMGWFRQAPGKERELVAAISGSGSITNYADSVKGRFTISADNSKNTAYLQMNSLKPEDTAVYYCAKAERGSERAYWGQGTLVTVSS

SEQ ID NO: 289 - protein, 123 aa, Artificial Sequence
  Description of Artificial Sequence: Synthetic polypeptide
EVQLVESGGGLVQPGGSLRLSCAASGFTFSTYWMGWFRQAPGKERELVAAISGSGSITNYADSVKGRFTISADNSKNTAYLQMNSLKPEDTAVYYCAKAGPNYYDSDTRGDYWGQGTLVTVSS

SEQ ID NO: 290 - protein, 120 aa, Artificial Sequence
  Description of Artificial Sequence: Synthetic polypeptide
EVQLVESGGGLVQPGGSLRLSCAASGFTFSTYWMGWFRQAPGKERELVAAISGSGSITNYADSVKGRFTISADNSKNTAYLQMNSLKPEDTAVYYCARDGDFWSGYRDYWGQGTLVTVSS

SEQ ID NO: 291 - protein, 119 aa, Artificial Sequence
  Description of Artificial Sequence: Synthetic polypeptide
EVQLVESGGGLVQPGGSLRLSCAASGSIYSLDAMGWFRQAPGKEREFVAAISRSGSITYYADSVKGRFTISADNSKNTAYLQMNSLKPEDTAVYYCTTDHYVWGTFDPWGQGTLVTVSS

SEQ ID NO: 292 - protein, 120 aa, Artificial Sequence
  Description of Artificial Sequence: Synthetic polypeptide
EVQLVESGGGLVQPGGSLRLSCAASGFTFSTYWMGWFRQAPGKERELVAAISGSGSITNYADSVKGRFTISADNSKNTAYLQMNSLKPEDTAVYYCARGPYGGASYFTVWGQGTLVTVSS

SEQ ID NO: 293 - protein, 124 aa, Artificial Sequence
  Description of Artificial Sequence: Synthetic polypeptide
EVQLVESGGGLVQPGGSLRLSCAASGFTFSTYWMGWFRQAPGKERELVAAISGSGSITNYADSVKGRFTISADNSKNTAYLQMNSLKPEDTAVYYCARGVGYCGGMGCHEGDYWGQGTLVTVSS

SEQ ID NO: 294 - protein, 120 aa, Artificial Sequence
  Description of Artificial Sequence: Synthetic polypeptide
EVQLVESGGGLVQPGGSLRLSCAASGFTFSTYWMGWFRQAPGKERELVAAISGSGSITNYADSVKGRFTISADNSKNTAYLQMNSLKPEDTAVYYCARPYCSSTSCYSSWGQGTLVTVSS

SEQ ID NO: 295 - protein, 120 aa, Artificial Sequence
  Description of Artificial Sequence: Synthetic polypeptide
EVQLVESGGGLVQPGGSLRLSCAASGFTFSTYWMGWFRQAPGKERELVAAISGSGSITNYADSVKGRFTISADNSKNTAYLQMNSLKPEDTAVYYCARQMCGGGDCYIHWGQGTLVTVSS

SEQ ID NO: 296 - protein, 120 aa, Artificial Sequence
  Description of Artificial Sequence: Synthetic polypeptide
EVQLVESGGGLVQPGGSLRLSCAASGFTFSTYWMGWFRQAPGKERELVAAISGSGSITNYADSVKGRFTISADNSKNTAYLQMNSLKPEDTAVYYCARVYYDSSGYYDYWGQGTLVTVSS

SEQ ID NO: 297 - protein, 121 aa, Artificial Sequence
  Description of Artificial Sequence: Synthetic polypeptide
EVQLVESGGGLVQPGGSLRLSCAASGFTFSTYWMGWFRQAPGKERELVAAISGSGSITNYADSVKGRFTISADNSKNTAYLQMNSLKPEDTAVYYCASLWAGYDGDYFNYWGQGTLVTVSS

SEQ ID NO: 298 - protein, 120 aa, Artificial Sequence
  Description of Artificial Sequence: Synthetic polypeptide
EVQLVESGGGLVQPGGSLRLSCAASGFTFSTYWMGWFRQAPGKERELVAAISGSGSITNYADSVKGRFTISADNSKNTAYLQMNSLKPEDTAVYYCATSKLVGSTYVDYWGQGTLVTVSS

SEQ ID NO: 299 - protein, 118 aa, Artificial Sequence
  Description of Artificial Sequence: Synthetic polypeptide
EVQLVESGGGLVQPGGSLRLSCAASGFTFSTYWMGWFRQAPGKERELVAAISGSGSITNYADSVKGRFTISADNSKNTAYLQMNSLKPEDTAVYYCATWMGTYGDDYWGQGTLVTVSS

SEQ ID NO: 300 - protein, 115 aa, Artificial Sequence
  Description of Artificial Sequence: Synthetic polypeptide
EVQLVESGGGLVQPGGSLRLSCAASGFTFSTYWMGWFRQAPGKEREFVAATSSSGGSTSYADSVKGRFTISADNSKNTAYLQMNSLKPEDTAVYYCARAGYEDYWGQGTLVTVSS

SEQ ID NO: 301 - protein, 125 aa, Artificial Sequence
  Description of Artificial Sequence: Synthetic polypeptide
EVQLVESGGGLVQPGGSLRLSCAASGFTFSTYWMGWFRQAPGKEREFVAATSSSGGSTSYADSVKGRFTISADNSKNTAYLQMNSLKPEDTAVYYCARGPEWTPPGDYFYYMDDWGQGTLVTVSS

SEQ ID NO: 302 - protein, 121 aa, Artificial Sequence
  Description of Artificial Sequence: Synthetic polypeptide
EVQLVESGGGLVQPGGSLRLSCAASGFTFSTYWMGWFRQAPGKERELVAHIYSDGSINYADSVKGRFTISADNSKNTAYLQMNSLKPEDTAVYYCAKVESEDLLVDSLIYWGQGTLVTVSS

SEQ ID NO: 303 - protein, 125 aa, Artificial Sequence
  Description of Artificial Sequence: Synthetic polypeptide
EVQLVESGGGLVQPGGSLRLSCAASGFTFSTYWMGWFRQAPGKEREFVAVVNWNGDSTYYADSVKGRFTISADNSKNTAYLQMNSLKPEDTAVYYCARGPEWTPPGDYFYYMDDWGQGTLVTVSS

SEQ ID NO: 304 - protein, 119 aa, Artificial Sequence
  Description of Artificial Sequence: Synthetic polypeptide
EVQLVESGGGLVQPGGSLRLSCAASGFTIDDYAMGWFRQAPGKERELVSLINSDGTTSYADSVKGRFTISADNSKNTAYLQMNSLKPEDTAVYYCARVVYGSDSFDDFWGQGTLVTVSS

SEQ ID NO: 305 - protein, 118 aa, Artificial Sequence
  Description of Artificial Sequence: Synthetic polypeptide
EVQLVESGGGLVQPGGSLRLSCAASGFTLDAYAMGWFRQAPGKEREFVAAINSGGSTEYADSVKGRFTISADNSKNTAYLQMNSLKPEDTAVYYCANAYDFWSGPVYWGQGTLVTVSS

SEQ ID NO: 306 - protein, 119 aa, Artificial Sequence
  Description of Artificial Sequence: Synthetic polypeptide
EVQLVESGGGLVQPGGSLRLSCAASGFTLDAYAMGWFRQAPGKEREFVAAINSGGSTEYADSVKGRFTISADNSKNTAYLQMNSLKPEDTAVYYCVRPNLRYTYGYDYWGQGTLVTVSS

SEQ ID NO: 307 - protein, 120 aa, Artificial Sequence
  Description of Artificial Sequence: Synthetic polypeptide
EVQLVESGGGLVQPGGSLRLSCAASGFTLDAYAMGWFRQAPGKEREFVAAISKSDGSTYYADSVKGRFTISADNSKNTAYLQMNSLKPEDTAVYYCARVYYDSSGYNDYWGQGTLVTVSS

SEQ ID NO: 308 - protein, 119 aa, Artificial Sequence
  Description of Artificial Sequence: Synthetic polypeptide
EVQLVESGGGLVQPGGSLRLSCAASGFTLDAYAMGWFRQAPGKERELVAAISRSGNTYYADSVKGRFTISADNSKNTAYLQMNSLKPEDTAVYYCARNRLTGDSSQVFWGQGTLVTVSS

SEQ ID NO: 309 - protein, 122 aa, Artificial Sequence
  Description of Artificial Sequence: Synthetic polypeptide
EVQLVESGGGLVQPGGSLRLSCAASGFTFSSYPMGWFRQAPGKEREFVAAISSSGVTTYYADSVKGRFTISADNSKNTAYLQMNSLKPEDTAVYYCVTDQSAYGQTVFFDSWGQGTLVTVSS

SEQ ID NO: 310 - protein, 125 aa, Artificial Sequence
  Description of Artificial Sequence: Synthetic polypeptide
EVQLVESGGGLVQPGGSLRLSCAASGFTFSSYPMGWFRQAPGKEREFVAAISSSGVTTIYADSVKGRFTISADNSKNTAYLQMNSLKPEDTAVYYCARGPYYYDSSGYYGPNDYWGQGTLVTVSS

SEQ ID NO: 311 - protein, 130 aa, Artificial Sequence
  Description of Artificial Sequence: Synthetic polypeptide
EVQLVESGGGLVQPGGSLRLSCAASGFTDDYYVMGWFRQAPGKEREFVAVISWSGSNTYYADSVKGRFTISADNSKNTAYLQMNSLKPEDTAVYYCARALQYCSPTSCYVDDYFYYMDVWGQGTLVTVSS

SEQ ID NO: 312 - protein, 122 aa, Artificial Sequence
  Description of Artificial Sequence: Synthetic polypeptide
EVQLVESGGGLVQPGGSLRLSCAASGFTDGIDAMGWFRQAPGKERELVAVISWSGGITWYADSVKGRFTISADNSKNTAYLQMNSLKPEDTAVYYCVRAGDTRNDYNYGAYWGQGTLVTVSS

SEQ ID NO: 313 - protein, 119 aa, Artificial Sequence
  Description of Artificial Sequence: Synthetic polypeptide
EVQLVESGGGLVQPGGSLRLSCAASGFTFDDTGMGWFRQAPGKEREGVAAIGSDGSTSYADSVKGRFTISADNSKNTAYLQMNSLKPEDTAVYYCAKGAQWEQRTYDSWGQGTLVTVSS

SEQ ID NO: 314 - protein, 117 aa, Artificial Sequence
  Description of Artificial Sequence: Synthetic polypeptide
EVQLVESGGGLVQPGGSLRLSCAASGFTFDDYNMGWFRQAPGKEREGVSYISSSDGSTYYADSVKGRFTISADNSKNTAYLQMNSLKPEDTAVYYCAAALDGYSGSWGQGTLVTVSS

SEQ ID NO: 315 - protein, 124 aa, Artificial Sequence
  Description of Artificial Sequence: Synthetic polypeptide
EVQLVESGGGLVQPGGSLRLSCAASGFTFDDYPMGWFRQAPGKERELVAAIRWSDGTTYYADSVKGRFTISADNSKNTAYLQMNSLKPEDTAVYYCARLVVPANTYFYYAMDVWGQGTLVTVSS

SEQ ID NO: 316 - protein, 122 aa, Artificial Sequence
  Description of Artificial Sequence: Synthetic polypeptide
EVQLVESGGGLVQPGGSLRLSCAASGFTFDDYPMGWFRQAPGKERELVAAIRWSDGTTYYADSVKGRFTISADNSKNTAYLQMNSLKPEDTAVYYCATDGADTAPIYGMAVWGQGTLVTVSS

SEQ ID NO: 317 - protein, 119 aa, Artificial Sequence
  Description of Artificial Sequence: Synthetic polypeptide
EVQLVESGGGLVQPGGSLRLSCAASGFTFDDYVMGWFRQAPGKEREFVAAISRSPGVTYYADSVKGRFTISADNSKNTAYLQMNSLKPEDTAVYYCAREPGPADYRDYWGQGTLVTVSS

SEQ ID NO: 318 - protein, 123 aa, Artificial Sequence
  Description of Artificial Sequence: Synthetic polypeptide
EVQLVESGGGLVQPGGSLRLSCAASGFTFDDYVMGWFRQAPGKEREFVAAISTGGDTTYYADSVKGRFTISADNSKNTAYLQMNSLKPEDTAVYYCATDLSGRGDVSEYEYDWGQGTLVTVSS

SEQ ID NO: 319 - protein, 120 aa, Artificial Sequence
  Description of Artificial Sequence: Synthetic polypeptide
EVQLVESGGGLVQPGGSLRLSCAASGFTFDDYVMGWFRQAPGKEREGVSWISSSDKDTYYADSVKGRFTISADNSKNTAYLQMNSLKPEDTAVYYCVKVANDYGNYEPSWGQGTLVTVSS

SEQ ID NO: 320 - protein, 122 aa, Artificial Sequence
  Description of Artificial Sequence: Synthetic polypeptide
EVQLVESGGGLVQPGGSLRLSCAASGFTFDGYAMGWFRQAPGKERELVAAVSWDGRNTYYADSVKGRFTISADNSKNTAYLQMNSLKPEDTAVYYCVRAGDTRNDYNYGAYWGQGTLVTVSS

SEQ ID NO: 321 - protein, 119 aa, Artificial Sequence
  Description of Artificial Sequence: Synthetic polypeptide
EVQLVESGGGLVQPGGSLRLSCAASGFTFDRSWMGWFRQAPGKEREWVAGIGSDGTTIYADSVKGRFTISADNSKNTAYLQMNSLKPEDTAVYYCARDYYDSSGYYYVWGQGTLVTVSS

SEQ ID NO: 322 - protein, 123 aa, Artificial Sequence
  Description of Artificial Sequence: Synthetic polypeptide
EVQLVESGGGLVQPGGSLRLSCAASGFTFDRSYHMGWFRQAPGKEREFVTAINWSLTRTHYADSVKGRFTISADNSKNTAYLQMNSLKPEDTAVYYCATGTFDVLRFLEWRLWGQGTLVTVSS

SEQ ID NO: 323 - protein, 122 aa, Artificial Sequence
  Description of Artificial Sequence: Synthetic polypeptide
EVQLVESGGGLVQPGGSLRLSCAASGFTFDYYAMGWFRQAPGKERELVAGISWNGGSIYYADSVKGRFTISADNSKNTAYLQMNSLKPEDTAVYYCMRYYDSSGYSQDFDYWGQGTLVTVSS

SEQ ID NO: 324 - protein, 125 aa, Artificial Sequence
  Description of Artificial Sequence: Synthetic polypeptide
EVQLVESGGGLVQPGGSLRLSCAASGFTFEDYAMGWFRQAPGKERELVAAISGSGSITNYADSVKGRFTISADNSKNTAYLQMNSLKPEDTAVYYCARGPEWTPPGDYFYYMDDWGQGTLVTVSS

SEQ ID NO: 325 - protein, 121 aa, Artificial Sequence
  Description of Artificial Sequence: Synthetic polypeptide
EVQLVESGGGLVQPGGSLRLSCAASGFTFEDYAMGWFRQAPGKEREFVAAISSSGISTIYADSVKGRFTISADNSKNTAYLQMNSLKPEDTAVYYCAREGCSSTSCYLDPWGQGTLVTVSS

SEQ ID NO: 326 - protein, 116 aa, Artificial Sequence
  Description of Artificial Sequence: Synthetic polypeptide
EVQLVESGGGLVQPGGSLRLSCAASGFTFEDYAMGWFRQAPGKEREWVSGISSGGTTVYADSVKGRFTISADNSKNTAYLQMNSLKPEDTAVYYCGRTSYYGDFEWGQGTLVTVSS

SEQ ID NO: 327 - protein, 125 aa, Artificial Sequence
  Description of Artificial Sequence: Synthetic polypeptide
EVQLVESGGGLVQPGGSLRLSCAASGFTFGHYAMGWFRQAPGKEREFVAAINRSGDTTYYADSVKGRFTISADNSKNTAYLQMNSLKPEDTAVYYCARGPEWTPPGDYFYYMDDWGQGTLVTVSS

SEQ ID NO: 328 - protein, 125 aa, Artificial Sequence
  Description of Artificial Sequence: Synthetic polypeptide
EVQLVESGGGLVQPGGSLRLSCAASGFTFRRYVMGWFRQAPGKEREFVAAIRWSGGITWYADSVKGRFTISADNSKNTAYLQMNSLKPEDTAVYYCARGPEWTPPGDYFYYMDDWGQGTLVTVSS

SEQ ID NO: 329 - protein, 121 aa, Artificial Sequence
  Description of Artificial Sequence: Synthetic polypeptide
EVQLVESGGGLVQPGGSLRLSCAASGFTFRRYVMGWFRQAPGKEREFVAAIRWSGGITWYADSVKGRFTISADNSKNTAYLQMNSLKPEDTAVYYCVRGRSRGTSGTTADWGQGTLVTVSS

SEQ ID NO: 330 - protein, 120 aa, Artificial Sequence
  Description of Artificial Sequence: Synthetic polypeptide
EVQLVESGGGLVQPGGSLRLSCAASGFTFRSYPMGWFRQAPGKEREFVAAISGSDGSTYYADSVKGRFTISADNSKNTAYLQMNSLKPEDTAVYYCARASSDYGDVSGPWGQGTLVTVSS

SEQ ID NO: 331 - protein, 122 aa, Artificial Sequence
  Description of Artificial Sequence: Synthetic polypeptide
EVQLVESGGGLVQPGGSLRLSCAASGFTFSDYPMGWFRQAPGKEREAVAAIASMGGLTYYADSVKGRFTISADNSKNTAYLQMNSLKPEDTAVYYCARLFAQYSDYDYVAEWGQGTLVTVSS

SEQ ID NO: 332 - protein, 128 aa, Artificial Sequence
  Description of Artificial Sequence: Synthetic polypeptide
EVQLVESGGGLVQPGGSLRLSCAASGFTFSDYPMGWFRQAPGKEREAVAAIASMGGLTYYADSVKGRFTISADNSKNTAYLQMNSLKPEDTAVYYCARSDYDVVSGLTNDYLYYLDDWGQGTLVTVSS

SEQ ID NO: 333 - protein, 123 aa, Artificial Sequence
  Description of Artificial Sequence: Synthetic polypeptide
EVQLVESGGGLVQPGGSLRLSCAASGFTFSEYGMGWFRQAPGKEREFVAGVAWSSDFTAYADSVKGRFTISADNSKNTAYLQMNSLKPEDTAVYYCARVGLGSCSTTSCFDYWGQGTLVTVSS

SEQ ID NO: 334 - protein, 121 aa, Artificial Sequence
  Description of Artificial Sequence: Synthetic polypeptide
EVQLVESGGGLVQPGGSLRLSCAASGFTFSGNWMGWFRQAPGKEREGVSCIRWSGGQITYYADSVKGRFTISADNSKNTAYLQMNSLKPEDTAVYYCTKGPTGPPRFFDFWGQGTLVTVSS

SEQ ID NO: 335 - protein, 112 aa, Artificial Sequence
  Description of Artificial Sequence: Synthetic polypeptide
EVQLVESGGGLVQPGGSLRLSCAASGFTFSNYWMGWFRQAPGKERELVATITSGGSTYYADSVKGRFTISADNSKNTAYLQMNSLKPEDTAVYYCRAGASYWGQGTLVTVSS

SEQ ID NO: 336 - protein, 117 aa, Artificial Sequence
  Description of Artificial Sequence: Synthetic polypeptide
EVQLVESGGGLVQPGGSLRLSCAASGFTFSRYAMGWFRQAPGKEREFVAAINYSGGSTNYADSVKGRFTISADNSKNTAYLQMNSLKPEDTAVYYCAAVGAAGAVFWGQGTLVTVSS

SEQ ID NO: 337 - protein, 117 aa, Artificial Sequence
  Description of Artificial Sequence: Synthetic polypeptide
EVQLVESGGGLVQPGGSLRLSCAASGFTFSSDAMGWFRQAPGKERELVAAVSGTGTIAYYADSVKGRFTISADNSKNTAYLQMNSLKPEDTAVYYCARGSGGGVDYWGQGTLVTVSS

SEQ ID NO: 338 - protein, 124 aa, Artificial Sequence
  Description of Artificial Sequence: Synthetic polypeptide
EVQLVESGGGLVQPGGSLRLSCAASGFTFSSDDYSMGWFRQAPGKERELVAGVNWSGKDTYYADSVKGRFTISADNSKNTAYLQMNSLKPEDTAVYYCARANKYYYDYYGVDVWGQGTLVTVSS

SEQ ID NO: 339 - protein, 123 aa, Artificial Sequence
  Description of Artificial Sequence: Synthetic polypeptide
EVQLVESGGGLVQPGGSLRLSCAASGYTYTTYSMGWFRQAPGQRTRICGGDYWSGKDTYYADSVKGRFTISADNSKNTAYLQMNSLKPEDTAVYYCARGPDMIRSWYAWFDPWGQGTLVTVSS

SEQ ID NO: 340 - protein, 125 aa, Artificial Sequence
  Description of Artificial Sequence: Synthetic polypeptide
QVQLVESGGGLVQPGGSLRLSCAASGNIFINNAMGWFRQAPGKERELVAAINRSGGATSYADSVKGRFTISADNSKNTAYLQMNSLKPEDTAVYYCARLFGSPSSSADYYYFDLWGQGTLVTVSS

SEQ ID NO: 341 - protein, 126 aa, Artificial Sequence
  Description of Artificial Sequence: Synthetic polypeptide
EVQLVESGGGLVQPGGSLRLSCAASGSIFSINAMGWFRQAPGKEREFVAAISWSAGSTYYADSVKGRFTISADNSKNTAYLQMNSLKPEDTAVYYCAKDRCGGDCNFSVLDWFDPWGQGTLVTVSS

SEQ ID NO: 342 - protein, 121 aa, Artificial Sequence
  Description of Artificial Sequence: Synthetic polypeptide
EVQLVESGGGLVQPGGSLRLSCAASGFNFDDYAMGWFRQAPGKEREWVSEISSGGNKDYADSVKGRFTISADNSKNTAYLQMNSLKPEDTAVYYCSAIISSTTGTDYFQNWGQGTLVTVSS

SEQ ID NO: 343 - protein, 124 aa, Artificial Sequence
  Description of Artificial Sequence: Synthetic polypeptide
EVQLVESGGGLVQPGGSLRLSCAASGRTFSNTLMGWFRQAPGKEREAVAAISWSGDNTYYADSVKGRFTISADNSKNTAYLQMNSLKPEDTAVYYCAKAGGYDYVWGSYPSDYWGQGTLVTVSS

SEQ ID NO: 344 - protein, 128 aa, Artificial Sequence
  Description of Artificial Sequence: Synthetic polypeptide
EVQLVESGGGLVQPGGSLRLSCAASGRTGTIYGMGWFRQAPGKEREAVAAISWSDGSTYYADSVKGRFTISADNSKNTAYLQMNSLKPEDTAVYYCARSDYDVVSGLTNDYLYYLDDWGQGTLVTVSS

SEQ ID NO: 345 - protein, 129 aa, Artificial Sequence
  Description of Artificial Sequence: Synthetic polypeptide
EVQLVESGGGLVQPGGSLRLSCAASGRTPSIIAMGWFRQAPGKERELVAGISSEGTTIYADSVKGRFTISADNSKNTAYLQMNSLKPEDTAVYYCVKVGEQTEYVDGTGYDYFYAMDVWGQGTLVTVSS

SEQ ID NO: 346 - protein, 119 aa, Artificial Sequence
  Description of Artificial Sequence: Synthetic polypeptide
EVQLVESGGGLVQPGGSLRLSCAASGSIDNIHAMGWFRQAPGKERELVAGITWSGDSTYYADSVKGRFTISADNSKNTAYLQMNSLKPEDTAVYYCARSPGIRGPINHWGQGTLVTVSS

SEQ ID NO: 347 - protein, 124 aa, Artificial Sequence
  Description of Artificial Sequence: Synthetic polypeptide
EVQLVESGGGLVQPGGSLRLSCAASGSIDSIHVMGWFRQAPGKEREFVAAISWTGGSTAYADSVKGRFTISADNSKNTAYLQMNSLKPEDTAVYYCAKDFDYGDYWERDAFDIWGQGTLVTVSS

SEQ ID NO: 348 - protein, 122 aa, Artificial Sequence
  Description of Artificial Sequence: Synthetic polypeptide
EVQLVESGGGLVQPGGSLRLSCAASGSIDSIHVMGWFRQAPGKEREFVAAISWTGGSTAYADSVKGRFTISADNSKNTAYLQMNSLKPEDTAVYYCAKGRVGVYGDYLFDHWGQGTLVTVSS

SEQ ID NO: 349 - protein, 140 aa, Artificial Sequence
  Description of Artificial Sequence: Synthetic polypeptide
QVQLVQSGAEVKKPGSSVKVSCKASGGTFSSHVISWVRQAPGQGLEWMGEIIPLFGTTNYAQKFQGRVTITADESTSTAYMELSSLRSEDTAVYYCARANQHFAKGLKGPTSSTVFQGTKGYHYYGMDVWGQGTLVTVSS

SEQ ID NO: 350 - protein, 141 aa, Artificial Sequence
  Description of Artificial Sequence: Synthetic polypeptide
QVQLVQSGAEVKKPGSSVKVSCKASGGSFSSDAISWVRQAPGQGLEWMGGIIPFFGTTNYAQKFQGRVTITADESTSTAYMELSSLRSEDTAVYYCARDMYYDFSIAGDETFDVIGTRDEVVPADDAFDIWGQGTLVTVSS

SEQ ID NO: 351 - protein, 114 aa, Artificial Sequence
  Description of Artificial Sequence: Synthetic polypeptide
EVQLVESGGGLVQAGGSLRLSCAASGRTFNNDHMGWFRQAPGKEREFVAVIEIGGATNYADSVKGRFTISADNAKNTVYLQMNSLKPEDTAVYYCASWDGRQVWGQGTQVTVSS

SEQ ID NO: 352 - protein, 125 aa, Artificial Sequence
  Description of Artificial Sequence: Synthetic polypeptide
EVQLVESGGGLVQPGGSLRLSCAASGLTFDDSAMGWFRQAPGKEREFVAAMRWSGASTYYADSVKGRFTISADNSKNTAYLQMNSLKPEDTAVYYCAAEDPSMGYYTLEEYEYDWGQGTLVTVSS

SEQ ID NO: 353 - protein, 117 aa, Artificial Sequence
  Description of Artificial Sequence: Synthetic polypeptide
EVQLVESGGGLVQPGGSLRLSCAASGRTLSKYRMGWFRQAPGKEREFVAVIDTNGDNTLYADSVKGRFTISADNSKNTAYLQMNSLKPEDTAVYYCAAALDGYSGSWGQGTLVTVSS

SEQ ID NO: 354 - protein, 123 aa, Artificial Sequence
  Description of Artificial Sequence: Synthetic polypeptide
EVQLVESGGGLVQPGGSLRLSCAASGLPFSRPVMGWFRQAPGKERELVAAIRGSGGSTEYADSVRGLFTITADNSKNTEHLKMNLLKPEDTAVYYCASTRFAGRWYPDSKYRWGQGTLVTVST

SEQ ID NO: 355 - protein, 121 aa, Artificial Sequence
  Description of Artificial Sequence: Synthetic polypeptide
EVQLVESGGGLVQPGGSLRLSCAASGDISSIVAMGWFRQAPGKEREFVAVVSGSGDDTYYADSVKGRFTISADNSKNTAYLQMNSLKPEDTAVYYCATDEDYALGPNEFDWGQGTLVTVSS

SEQ ID NO: 356 - protein, 111 aa, Artificial Sequence
  Description of Artificial Sequence: Synthetic polypeptide
QVQLKESGPGLVAPSESLSITCTVSGFSLIDYGVNWIRQPPGKGLEWLGVIWGDGTTYYNPSLKSRLSISKDNSKSQVFLKVTSLTTDDTAMYYCARIVYWGQGTLVTVSA

SEQ ID NO: 357 - protein, 112 aa, Artificial Sequence
  Description of Artificial Sequence: Synthetic polypeptide
DIVMTQSPLSLPVSLGERASISCRSSQSLVHSDGNTYLEWYQQKPGQSPKLLIYKVSNRASGVPDRFSGSGSGTDFTLKISRVEAEDVGVYYCQQSSETPLTFGQGTKLEIK

SEQ ID NO: 358 - protein, 112 aa, Artificial Sequence
  Description of Artificial Sequence: Synthetic polypeptide
DIVMTQSPLSLPVSLGERASISCRSSQSLVHSNGNTYLAWYQQKPGQSPKLLIYKASNRASGVPDRFSGSGSGTDFTLKISRVEAEDVGVYYCQQSSSYPFTFGQGTKLEIK

SEQ ID NO: 359 - protein, 112 aa, Artificial Sequence
  Description of Artificial Sequence: Synthetic polypeptide
DIVMTQSPLSLPVSLGERASISCRSSQSLVHSDGNTYLAWYQQKPGQSPKLLIYKASNRFSGVPDRFSGSGSGTDFTLKISRVEAEDVGVYYCQQGSETPLTFGQGTKLEIK

SEQ ID NO: 360 - protein, 112 aa, Artificial Sequence
  Description of Artificial Sequence: Synthetic polypeptide
DIVMTQSPLSLPVSLGERASISCRSSQSLVHSNGNTYLAWYQQKPGQSPKLLIYKVSNRASGVPDRFSGSGSGTDFTLKISRVEAEDVGVYYCQQGYSTPLTFGQGTKLEIK

SEQ ID NO: 361 - protein, 112 aa, Artificial Sequence
  Description of Artificial Sequence: Synthetic polypeptide
DIVMTQSPLSLPVSLGERASISCRSSQSLVHSDGKTYLEWYQQKPGQSPKLLIYKASNRASGVPDRFSGSGSGTDFTLKISRVEAEDVGVYYCFQSSSTPFTFGQGTKLEIK

SEQ ID NO: 362 - protein, 112 aa, Artificial Sequence
  Description of Artificial Sequence: Synthetic polypeptide
DIVMTQSPLSLPVSLGERASISCRSSQSLVNSDGKTYLHWYQQKPGQSPKLLIYKASNRASGVPDRFSGSGSGTDFTLKISRVEAEDVGVYYCFQGSEYPFTFGQGTKLEIK

SEQ ID NO: 363 - protein, 112 aa, Artificial Sequence
  Description of Artificial Sequence: Synthetic polypeptide
DIVMTQSPLSLPVSLGERASISCRSSQSLVNSDGNTYLEWYQQKPGQSPKLLIYKASNRASGVPDRFSGSGSGTDFTLKISRVEAEDVGVYYCFQGSEYPFTFGQGTKLEIK

SEQ ID NO: 364 - protein, 112 aa, Artificial Sequence
  Description of Artificial Sequence: Synthetic polypeptide
DIVMTQSPLSLPVSLGERASISCRSSQSLVHSNGNTYLHWYQQKPGQSPKLLIYKVSNRASGVPDRFSGSGSGTDFTLKISRVEAEDVGVYYCFQSYHYPLTFGQGTKLEIK

SEQ ID NO: 365 - protein, 112 aa, Artificial Sequence
  Description of Artificial Sequence: Synthetic polypeptide
DIVMTQSPLSLPVSLGERASISCRSSQSLVNSDGNTYLHWYQQKPGQSPKLLIYKASNRASGVPDRFSGSGSGTDFTLKISRVEAEDVGVYYCQQGSSTPLTFGQGTKLEIK

SEQ ID NO: 366 - protein, 112 aa, Artificial Sequence
  Description of Artificial Sequence: Synthetic polypeptide
DIVMTQSPLSLPVSLGERASISCRSSQSLVNSNGKTYLAWYQQKPGQSPKLLIYKASNRFSGVPDRFSGSGSGTDFTLKISRVEAEDVGVYYCQQSSHVPFTFGQGTKLEIK

SEQ ID NO: 367 - protein, 112 aa, Artificial Sequence
  Description of Artificial Sequence: Synthetic polypeptide
DIVMTQSPLSLPVSLGERASISCRSSQSLVNSNGKTYLAWYQQKPGQSPKLLIYKASNRFSGVPDRFSGSGSGTDFTLKISRVEAEDVGVYYCQQGYHTPLTFGQGTKLEIK

SEQ ID NO: 368 - protein, 112 aa, Artificial Sequence
  Description of Artificial Sequence: Synthetic polypeptide
DIVMTQSPLSLPVSLGERASISCRSSQSLVNSDGKTYLHWYQQKPGQSPKLLIYKVSNRASGVPDRFSGSGSGTDFTLKISRVEAEDVGVYYCQQGYETPFTFGQGTKLEIK

SEQ ID NO: 369 - protein, 112 aa, Artificial Sequence
  Description of Artificial Sequence: Synthetic polypeptide
DIVMTQSPLSLPVSLGERASISCRSSQSLVNSDGKTYLEWYQQKPGQSPKLLIYKASNRFSGVPDRFSGSGSGTDFTLKISRVEAEDVGVYYCFQSSSVPLTFGQGTKLEIK

SEQ ID NO: 370 - protein, 112 aa, Artificial Sequence
  Description of Artificial Sequence: Synthetic polypeptide
DIVMTQSPLSLPVSLGERASISCRSSQSLVNSNGKTYLAWYQQKPGQSPKLLIYKVSNRASGVPDRFSGSGSGTDFTLKISRVEAEDVGVYYCQQSSEYPFTFGQGTKLEIK

SEQ ID NO: 371 - protein, 112 aa, Artificial Sequence
  Description of Artificial Sequence: Synthetic polypeptide
DIVMTQSPLSLPVSLGERASISCRSSQSLVHSNGKTYLHWYQQKPGQSPKLLIYKASNRASGVPDRFSGSGSGTDFTLKISRVEAEDVGVYYCFQGYHTPLTFGQGTKLEIK

SEQ ID NO: 372 - protein, 112 aa, Artificial Sequence
  Description of Artificial Sequence: Synthetic polypeptide
DIVMTQSPLSLPVSLGERASISCRSSQSLVNSNGNTYLHWYQQKPGQSPKLLIYKVSNRASGVPDRFSGSGSGTDFTLKISRVEAEDVGVYYCFQGSHYPFTFGQGTKLEIK

SEQ ID NO: 373 - protein, 112 aa, Artificial Sequence
  Description of Artificial Sequence: Synthetic polypeptide
DIVMTQSPLSLPVSLGERASISCRSSQSLVHSDGNTYLHWYQQKPGQSPKLLIYKVSNRASGVPDRFSGSGSGTDFTLKISRVEAEDVGVYYCQQGYETPFTFGQGTKLEIK

SEQ ID NO: 374 - protein, 112 aa, Artificial Sequence
  Description of Artificial Sequence: Synthetic polypeptide
DIVMTQSPLSLPVSLGERASISCRSSQSLVHSNGKTYLAWYQQKPGQSPKLLIYKASNRASGVPDRFSGSGSGTDFTLKISRVEAEDVGVYYCQQSYHVPFTFGQGTKLEIK

SEQ ID NO: 375 - protein, 112 aa, Artificial Sequence
  Description of Artificial Sequence: Synthetic polypeptide
DIVMTQSPLSLPVSLGERASISCRSSQSLVNSDGNTYLHWYQQKPGQSPKLLIYKASNRASGVPDRFSGSGSGTDFTLKISRVEAEDVGVYYCQQSSHTPFTFGQGTKLEIK

SEQ ID NO: 376 - protein, 112 aa, Artificial Sequence
  Description of Artificial Sequence: Synthetic polypeptide
DIVMTQSPLSLPVSLGERASISCRSSQSLVNSDGKTYLEWYQQKPGQSPKLLIYKASNRASGVPDRFSGSGSGTDFTLKISRVEAEDVGVYYCFQGSHYPFTFGQGTKLEIK

SEQ ID NO: 377 - protein, 112 aa, Artificial Sequence
  Description of Artificial Sequence: Synthetic polypeptide
DIVMTQSPLSLPVSLGERASISCRSSQSLVNSDGNTYLHWYQQKPGQSPKLLIYKVSNRFSGVPDRFSGSGSGTDFTLKISRVEAEDVGVYYCFQGYETPLTFGQGTKLEIK

SEQ ID NO: 378 - protein, 112 aa, Artificial Sequence
  Description of Artificial Sequence: Synthetic polypeptide
DIVMTQSPLSLPVSLGERASISCRSSQSLVNSDGNTYLHWYQQKPGQSPKLLIYKASNRASGVPDRFSGSGSGTDFTLKISRVEAEDVGVYYCQQSSHVPFTFGQGTKLEIK

SEQ ID NO: 379 - protein, 112 aa, Artificial Sequence
  Description of Artificial Sequence: Synthetic polypeptide
DIVMTQSPLSLPVSLGERASISCRSSQSLVNSDGNTYLEWYQQKPGQSPKLLIYKVSNRFSGVPDRFSGSGSGTDFTLKISRVEAEDVGVYYCFQGYHTPFTFGQGTKLEIK

SEQ ID NO: 380 - protein, 112 aa, Artificial Sequence
  Description of Artificial Sequence: Synthetic polypeptide
DIVMTQSPLSLPVSLGERASISCRSSQSLVNSNGKTYLAWYQQKPGQSPKLLIYKVSNRASGVPDRFSGSGSGTDFTLKISRVEAEDVGVYYCQQSYHTPFTFGQGTKLEIK

SEQ ID NO: 381 - protein, 112 aa, Artificial Sequence
  Description of Artificial Sequence: Synthetic polypeptide
DIVMTQSPLSLPVSLGERASISCRSSQSLVNSDGNTYLAWYQQKPGQSPKLLIYKASNRASGVPDRFSGSGSGTDFTLKISRVEAEDVGVYYCFQGSSTPLTFGQGTKLEIK

SEQ ID NO: 382 - protein, 112 aa, Artificial Sequence
  Description of Artificial Sequence: Synthetic polypeptide
DIVMTQSPLSLPVSLGERASISCRSSQSLVNSNGNTYLHWYQQKPGQSPKLLIYKVSNRFSGVPDRFSGSGSGTDFTLKISRVEAEDVGVYYCFQSYSTPFTFGQGTKLEIK

SEQ ID NO: 383 - protein, 112 aa, Artificial Sequence
  Description of Artificial Sequence: Synthetic polypeptide
YGSMTQSPLSLPVSLGERASISCRSSQSLVHSNGNTYLHWYQQKPGQSPKLLIYKASNRFSGVPDRFSGSGSGTDFTLKISRVEAEDVGVYYCQQSYSTPLTFGQGTKLEIK

SEQ ID NO: 384 - protein, 112 aa, Artificial Sequence
  Description of Artificial Sequence: Synthetic polypeptide
DIVMTQSPLSLPVSLGERASISCRSSQSLVNSNGKTYLAWYQQKPGQSPKLLIYKASNRASGVPDRFSGSGSGTDFTLKISRVEAEDVGVYYCQQSYEVPLTFGQGTKLEIK

SEQ ID NO: 385 - protein, 112 aa, Artificial Sequence
  Description of Artificial Sequence: Synthetic polypeptide
HIVMTQSPLSLPVSLGERASISCRSSQSLVHSNGKTYLHWYQQKPGQSPKLLIYKASNRASGVPDRFSGSGSGTDFTLKISRVEAEDVGVYYCQQSSSYPFTFGQGTKLEIK

SEQ ID NO: 386 - protein, 112 aa, Artificial Sequence
  Description of Artificial Sequence: Synthetic polypeptide
DIVMTQSPLSLPVSLGERASISCRSSQSLVHSDGKTYLEWYQQKPGQSPKLLIYKVSNRASGVPDRFSGSGSGTDFTLKISRVEAEDVGVYYCFQGSHYPFTFGQGTKLEIK

SEQ ID NO: 387 - protein, 112 aa, Artificial Sequence
  Description of Artificial Sequence: Synthetic polypeptide
DIVMTQSPLSLPVSLGERASISCRSSQSLVNSDGKTYLHWYQQKPGQSPKLLIYKVSNRASGVPDRFSGSGSGTDFTLKISRVEAEDVGVYYCQQGYSTPFTFGQGTKLEIK

SEQ ID NO: 388 - protein, 112 aa, Artificial Sequence
  Description of Artificial Sequence: Synthetic polypeptide
DIVMTQSPLSLPVSLGERASISCRSSQSLVHSDGKTYLAWYQQKPGQSPKLLIYKASNRFSGVPDRFSGSGSGTDFTLKISRVEAEDVGVYYCQQSYHVPFTFGQGTKLEIK

SEQ ID NO: 389 - protein, 112 aa, Artificial Sequence
  Description of Artificial Sequence: Synthetic polypeptide
DIVMTQSPLSLPVSLGERASISCRSSQSLVHSDGKTYLEWYQQKPGQSPKLLIYKASNRFSGVPDRFSGSGSGTDFTLKISRVEAEDVGVYYCQQSSHYPLTFGQGTKLEIK

SEQ ID NO: 390 - protein, 112 aa, Artificial Sequence
  Description of Artificial Sequence: Synthetic polypeptide
DIVMTQSPLSLPVSLGERASISCRSSQSLVNSNGKTYLAWYQQKPGQSPKLLIYKVSNRASGVPDRFSGSGSGTDFTLKISRVEAEDVGVYYCQQGSHVPFTFGQGTKLEIK

SEQ ID NO: 391 - protein, 112 aa, Artificial Sequence
  Description of Artificial Sequence: Synthetic polypeptide
DIVMTQSPLSLPVSLGERASISCRSSQSLVNSDGNTYLHWYQQKPGQSPKLLIYKASNRASGVPDRFSGSGSGTDFTLKISRVEAEDVGVYYCQQSSSTPFTFGQGTKLEIK

SEQ ID NO: 392 - protein, 112 aa, Artificial Sequence
  Description of Artificial Sequence: Synthetic polypeptide
DIVMTQSPLSLPVSLGERASISCRSSQSLVNSNGNTYLHWYQQKPGQSPKLLIYKASNRASGVPDRFSGSGSGTDFTLKISRVEAEDVGVYYCQQGYHYPLTFGQGTKLEIK

SEQ ID NO: 393 - protein, 112 aa, Artificial Sequence
  Description of Artificial Sequence: Synthetic polypeptide
DIVMTQSPLSLPVSLGERASISCRSSQSLVNSNGKTYLAWYQQKPGQSPKLLIYKASNRASGVPDRFSGSGSGTDFTLKISRVEAEDVGVYYCQQGSEYPLTFGQGTKLEIK

SEQ ID NO: 394 - protein, 112 aa, Artificial Sequence
  Description of Artificial Sequence: Synthetic polypeptide
DIVMTQSPLSLPVSLGERASISCRSSQSLVHSNGNTYLEWYQQKPGQSPKLLIYKVSNRASGVPDRFSGSGSGTDFTLKISRVEAEDVGVYYCQQGSSVPFTFGQGTKLEIK

SEQ ID NO: 395 - protein, 112 aa, Artificial Sequence
  Description of Artificial Sequence: Synthetic polypeptide
DIVMTQSPLSLPVSLGERASISCRSSQSLVNSNGNTYLAWYQQKPGQSPKLLIYKASNRASGVPDRFSGSGSGTDFTLKISRVEAEDVGVYYCFQGYEVPFTFGQGTKLEIK

SEQ ID NO: 396 - protein, 112 aa, Artificial Sequence
  Description of Artificial Sequence: Synthetic polypeptide
DIVMTQSPLSLPVSLGERASISCRSSQSLVNSNGNTYLEWYQQKPGQSPKLLIYKVSNRFSGVPDRFSGSGSGTDFTLKISRVEAEDVGVYYCQQSSEYPLTFGQGTKLEIK

SEQ ID NO: 397 - protein, 112 aa, Artificial Sequence
  Description of Artificial Sequence: Synthetic polypeptide
DIVMTQSPLSLPVSLGERASISCRSSQSLVHSNGKTYLEWYQQKPGQSPKLLIYKASNRASGVPDRFSGSGSGTDFTLKISRVEAEDVGVYYCFQGSHYPLTFGQGTKLEIK

SEQ ID NO: 398 - protein, 112 aa, Artificial Sequence
  Description of Artificial Sequence: Synthetic polypeptide
YGSMTQSPLSLPVSLGERASISCRSSQSLVHSNGNTYLHWYQQKPGQSPKLLIYKVSNRFSGVPDRFSGSGSGTDFTLKISRVEAEDVGVYYCQQSSSYPFTFGQGTKLEIK

SEQ ID NO: 399 - protein, 112 aa, Artificial Sequence
  Description of Artificial Sequence: Synthetic polypeptide
DIVMTQSPLSLPVSLGERASISCRSSQSLVHSNGNTYLHWYQQKPGQSPKLLIYKASNRASGVPDRFSGSGSGTDFTLKISRVEAEDVGVYYCFQSYEYPFTFGQGTKLEIK

SEQ ID NO: 400 - protein, 112 aa, Artificial Sequence
  Description of Artificial Sequence: Synthetic polypeptide
DIVMTQSPLSLPVSLGERASISCRSSQSLVHSNGKTYLHWYQQKPGQSPKLLIYKASNRASGVPDRFSGSGSGTDFTLKISRVEAEDVGVYYCFQSSSTPFTFGQGTKLEIK

SEQ ID NO: 401 - protein, 112 aa, Artificial Sequence
  Description of Artificial Sequence: Synthetic polypeptide
DIVMTQSPLSLPVSLGERASISCRSSQSLVHSDGKTYLHWYQQKPGQSPKLLIYKASNRFSGVPDRFSGSGSGTDFTLKISRVEAEDVGVYYCQQSYHYPFTFGQGTKLEIK

SEQ ID NO: 402 - protein, 112 aa, Artificial Sequence
  Description of Artificial Sequence: Synthetic polypeptide
DIVMTQSPLSLPVSLGERASISCRSSQSLVHSDGNTYLAWYQQKPGQSPKLLIYKVSNRASGVPDRFSGSGSGTDFTLKISRVEAEDVGVYYCFQGSHYPFTFGQGTKLEIK

SEQ ID NO: 403 - protein, 112 aa, Artificial Sequence
  Description of Artificial Sequence: Synthetic polypeptide
DIVMTQSPLSLPVSLGERASISCRSSQSLVHSNGNTYLAWYQQKPGQSPKLLIYKASNRFSGVPDRFSGSGSGTDFTLKISRVEAEDVGVYYCQQSYSYPLTFGQGTKLEIK

SEQ ID NO: 404 - protein, 112 aa, Artificial Sequence
  Description of Artificial Sequence: Synthetic polypeptide
DIVMTQSPLSLPVSLGERASISCRSSQSLVNSNGNTYLAWYQQKPGQSPKLLIYKVSNRASGVPDRFSGSGSGTDFTLKISRVEAEDVGVYYCFQSYHTPLTFGQGTKLEIK

SEQ ID NO: 405 - protein, 112 aa, Artificial Sequence
  Description of Artificial Sequence: Synthetic polypeptide
DIVMTQSPLSLPVSLGERASISCRSSQSLVNSDGNTYLAWYQQKPGQSPKLLIYKASNRFSGVPDRFSGSGSGTDFTLKISRVEAEDVGVYYCFQSYEVPLTFGQGTKLEIK

SEQ ID NO: 406 - protein, 112 aa, Artificial Sequence
  Description of Artificial Sequence: Synthetic polypeptide
DIVMTQSPLSLPVSLGERASISCRSSQSLVHSDCKTYLAWYQQKPGQSPKLLIYKASNRFSGVPDRFSGSGSGTDFTLKISRVEAEDVGVYYCQQGSEYPFTFGQGTKLEIK

SEQ ID NO: 407 - protein, 112 aa, Artificial Sequence
  Description of Artificial Sequence: Synthetic polypeptide
DIVMTQSPLSLPVSLGERASISCRSSQSLVHSDGNTYLEWYQQKPGQSPKLLIYKASNRASGVPDRFSGSGSGTDFTLKISRVEAEDVGVYYCQQSSSVPLTFGQGTKLEIK

SEQ ID NO: 408 - protein, 112 aa, Artificial Sequence
  Description of Artificial Sequence: Synthetic polypeptide
DIVMTQSPLSLPVSLGERASISCRSSQSLVNSDGKTYLAWYQQKPGQSPKLLIYKVSNRFSGVPDRFSGSGSGTDFTLKISRVEAEDVGVYYCQQGSHVPFTFGQGTKLEIK

SEQ ID NO: 409 - protein, 112 aa, Artificial Sequence
  Description of Artificial Sequence: Synthetic polypeptide
DIVMTQSPLSLPVSLGERASISCRSSQSLVNSDGKTYLEWYQQKPGQSPKLLIYKVSNRASGVPDRFSGSGSGTDFTLKISRVEAEDVGVYYCQQSYSVPLTFGQGTKLEIK

SEQ ID NO: 410 - protein, 112 aa, Artificial Sequence
  Description of Artificial Sequence: Synthetic polypeptide
DIVMTQSPLSLPVSLGERASISCRSSQSLVNSNGKTYLAWYQQKPGQSPKLLIYKVSNRFSGVPDRFSGSGSGTDFTLKISRVEAEDVGVYYCQQSYSVPLTFGQGTKLEIK

SEQ ID NO: 411 - protein, 112 aa, Artificial Sequence
  Description of Artificial Sequence: Synthetic polypeptide
DIVMTQSPLSLPVSLGERASISCRSSQSLVNSNGNTYLAWYQQKPGQSPKLLIYKVSNRASGVPDRFSGSGSGTDFTLKISRVEAEDVGVYYCFQSSHTPFTFGQGTKLEIK

SEQ ID NO: 412 - protein, 112 aa, Artificial Sequence
  Description of Artificial Sequence: Synthetic polypeptide
DIVMTQSPLSLPVSLGERASISCRSSQSLVNSDGNTYLEWYQQKPGQSPKLLIYKASNRASGVPDRFSGSGSGTDFTLKISRVEAEDVGVYYCFQGSSTPLTFGQGTKLEIK

SEQ ID NO: 413 - protein, 112 aa, Artificial Sequence
  Description of Artificial Sequence: Synthetic polypeptide
DIVMTQSPLSLPVSLGERASISCRSSQSLVHSNGKTYLAWYQQKPGQSPKLLIYKASNRFSGVPDRFSGSGSGTDFTLKISRVEAEDVGVYYCQQSSSYPFTFGQGTKLEIK

SEQ ID NO: 414 - protein, 112 aa, Artificial Sequence
  Description of Artificial Sequence: Synthetic polypeptide
DIVMTQSPLSLPVSLGERASISCRSSQSLVHSDGNTYLAWYQQKPGQSPKLLIYKASNRFSGVPDRFSGSGSGTDFTLKISRVEAEDVGVYYCQQSYEYPFTFGQGTKLEIK

SEQ ID NO: 415 - protein, 112 aa, Artificial Sequence
  Description of Artificial Sequence: Synthetic polypeptide
DIVMTQSPLSLPVSLGERASISCRSSQSLVNSDGKTYLAWYQQKPGQSPKLLIYKASNRASGVPDRFSGSGSGTDFTLKISRVEAEDVGVYYCFQSSHTPLTFGQGTKLEIK

SEQ ID NO: 416 - protein, 112 aa, Artificial Sequence
  Description of Artificial Sequence: Synthetic polypeptide
DIVMTQSPLSLPVSLGERASISCRSSQSLVNSDGKTYLHWYQQKPGQSPKLLIYKVSNRFSGVPDRFSGSGSGTDFTLKISRVEAEDVGVYYCQQSSETPFTFGQGTKLEIK

SEQ ID NO: 417 - protein, 112 aa, Artificial Sequence
  Description of Artificial Sequence: Synthetic polypeptide
DIVMTQSPLSLPVSLGERASISCRSSQSLVNSNGNTYLAWYQQKPGQSPKLLIYKASNRASGVPDRFSGSGSGTDFTLKISRVEAEDVGVYYCFQSYSVPLTFGQGTKLEIK

SEQ ID NO: 418 - protein, 112 aa, Artificial Sequence
  Description of Artificial Sequence: Synthetic polypeptide
DIVMTQSPLSLPVSLGERASISCRSSQSLVNSDGKTYLEWYQQKPGQSPKLLIYKASNRFSGVPDRFSGSGSGTDFTLKISRVEAEDVGVYYCFQSYETPLTFGQGTKLEIK

SEQ ID NO: 419 - protein, 112 aa, Artificial Sequence
  Description of Artificial Sequence: Synthetic polypeptide
DIVMTQSPLSLPVSLGERASISCRSSQSLVHSNGNTYLAWYQQKPGQSPKLLIYKASNRFSGVPDRFSGSGSGTDFTLKISRVEAEDVGVYYCFQSSSTPFTFGQGTKLEIK

SEQ ID NO: 420 - protein, 112 aa, Artificial Sequence
  Description of Artificial Sequence: Synthetic polypeptide
DIVMTQSPLSLPVSLGERASISCRSSQSLVHSNGNTYLHWYQQKPGQSPKLLIYKASNRASGVPDRFSGSGSGTDFTLKISRVEAEDVGVYYCQQSYHYPFTFGQGTKLEIK

SEQ ID NO: 421 - protein, 112 aa, Artificial Sequence
  Description of Artificial Sequence: Synthetic polypeptide
DIVMTQSPLSLPVSLGERASISCRSSQSLVHSDGNTYLAWYQQKPGQSPKLLIYKASNRFSGVPDRFSGSGSGTDFTLKISRVEAEDVGVYYCQQESSTPFTFGQGTKLEIK

SEQ ID NO: 422 - protein, 112 aa, Artificial Sequence
  Description of Artificial Sequence: Synthetic polypeptide
DIVMTQSPLSLPVSLGERASISCRSSQSLVHSDGKTYLEWYQQKPGQSPKLLIYKASNRFSGVPDRFSGSGSGTDFTLKISRVEAEDVGVYYCQQSYHYPLTFGQGTKLEIK

SEQ ID NO: 423 - protein, 112 aa, Artificial Sequence
  Description of Artificial Sequence: Synthetic polypeptide
DIVMTQSPLSLPVSLGERASISCRSSQSLVNSDGKTYLHWYQQKPGQSPKLLIYKASNRASGVPDRFSGSGSGTDFTLKISRVEAEDVGVYYCQQSYHTPLTFGQGTKLEIK

SEQ ID NO: 424 - protein, 112 aa, Artificial Sequence
  Description of Artificial Sequence: Synthetic polypeptide
DIVMTQSPLSLPVSLGERASISCRSSQSLVHSDGNTYLAWYQQKPGQSPKLLIYKVSNRASGVPDRFSGSGSGTDFTLKISRVEAEDVGVYYCQQSYEYPFTFGQGTKLEIK

SEQ ID NO: 425 - protein, 112 aa, Artificial Sequence
  Description of Artificial Sequence: Synthetic polypeptide
DIVMTQSPLSLPVSLGERASISCRSSQSLVHSDGKTYLHWYQQKPGQSPKLLIYKVSNRFSGVPDRFSGSGSGTDFTLKISRVEAEDVGVYYCQQGSSTPLTFGQGTKLEIK

SEQ ID NO: 426 - protein, 112 aa, Artificial Sequence
  Description of Artificial Sequence: Synthetic polypeptide
DIVMTQSPLSLPVSLGERASISCRSSQSLVHSNGKTYLHWYQQKPGQSPKLLIYKVSNRFSGVPDRFSGSGSGTDFTLKISRVEAEDVGVYYCQQGSSIPLTFGQGTKLEIK

SEQ ID NO: 427 - protein, 112 aa, Artificial Sequence
  Description of Artificial Sequence: Synthetic polypeptide
DIVMTQSPLSLPVSLGERASISCRSSQSLVHSDGKTYLAWYQQKPGQSPKLLIYKASNRASGVTDRFSGSGSGTDFTLKISRVEAEDVGVYYCFQSSSTPLTFGQGTKLEIK

SEQ ID NO: 428 - protein, 112 aa, Artificial Sequence
  Description of Artificial Sequence: Synthetic polypeptide
DIVMTQSPLSLPVSLGERASISCRSSQSLVHSDGKTYLHWYQQKPGQSPKLLIYKVSNRASGVPDRFSGSGSGTDFTLKISRVEAEDVGVYYCQQSYHYPLTFGQGTKLEIK

SEQ ID NO: 429 - protein, 112 aa, Artificial Sequence
  Description of Artificial Sequence: Synthetic polypeptide
DIVMTQSPLSLPVSLGERASISCRSSQSLVNSDGNTYLAWYQQKPGQSPKLLIYKASNRFSGVPDRFSGSGSGTDFTLKISRVEAEDVGVYYCFQGYETPLTFGQGTKLEIK

SEQ ID NO: 430 - protein, 112 aa, Artificial Sequence
  Description of Artificial Sequence: Synthetic polypeptide
DIVMTQSPLSLPVSLGERASISCRSSQSLVHSNGNTYLAWYQQKPGQSPKLLIYKVSNRASGVPDRFSGSGSGTDFTLKISRVEAEDVGVYYCQQGYHTPLTFGQGTKLEIK

SEQ ID NO: 431 - protein, 112 aa, Artificial Sequence
  Description of Artificial Sequence: Synthetic polypeptide
DIVMTQSPLSLPVSLGERASISCRSSQSLVHSDGNTYLHWYQQKPGQSPKLLIYKASNRASGVPDRFSGSGSGTDFTLKISRVEAEDVGVYYCQQSSHVPFTFGQGTKLEIK

SEQ ID NO: 432 - protein, 112 aa, Artificial Sequence
  Description of Artificial Sequence: Synthetic polypeptide
DIVMTQSPLSLPVSLGERASISCRSSQSLVNSDGKTYLAWYQQKPGQSPKLLIYKASNRFSGVPDRFSGSGSGTDFTLKISRVEAEDVGVYYCQQGYSYPLTFGQGTKLEIK

SEQ ID NO: 433 - protein, 112 aa, Artificial Sequence
  Description of Artificial Sequence: Synthetic polypeptide
DIVMTQSPLSLPVSLGERASISCRSSQSLVNSNGNTYLEWYQQKPGQSPKLLIYKVSNRFSGVPDRFSGSGSGTDFTLKISRVEAEDVGVYYCQQGSHVPFTFGQGTKLEIK

SEQ ID NO: 434 - protein, 112 aa, Artificial Sequence
  Description of Artificial Sequence: Synthetic polypeptide
DIVMTQSPLSLPVSLGERASISCRSSQSLVNSNGKTYLAWYQQKPGQSPKLLIYKVSNRFSGVPDRFSGSGSGTDFTLKISRVEAEDVGVYYCQQGYSVPLTFGQGTKLEIK

SEQ ID NO: 435 - protein, 112 aa, Artificial Sequence
  Description of Artificial Sequence: Synthetic polypeptide
DIVMTQSPLSLPVSLGERASISCRSSQSLVHSNGKTYLEWYQQKPGQSPKLLIYKVSNRASGVPDRFSGSGSGTDFTLKISRVEAEDVGVYYCFQSYSVPFTFGQGTKLEIK

SEQ ID NO: 436 - protein, 112 aa, Artificial Sequence
  Description of Artificial Sequence: Synthetic polypeptide
DIVMTQSPLSLPVSLGERASISCRSSQSLVHSDGNTYLAWYQQKPGQSPKLLIYKVSNRASGVPDRFSGSGSGTDFTLKISRVEAEDVGVYYCFQSYSYPLTFGQGTKLEIK

SEQ ID NO: 437 - protein, 112 aa, Artificial Sequence
  Description of Artificial Sequence: Synthetic polypeptide
DIVMTQSPLSLPVSLGERASISCRSSQSLVNSNGKTYLAWYQQKPGQSPKLLIYKASNRFSGVPDRFSGSGSGTDFTLKISRVEAEDVGVYYCQQSYHYPLTFGQGTKLEIK

SEQ ID NO: 438 - protein, 112 aa, Artificial Sequence
  Description of Artificial Sequence: Synthetic polypeptide
DIVMTQSPLSLPVSLGERASISCRSSQSLVNSNSNTYLEWYQQKPGQSPKLLIYKASNRFSGVPDRFSGSGSGTDFTLKISRVEAEDVGVYYCQQSSHVPFTFGQGTKLEIK

SEQ ID NO: 439 - protein, 112 aa, Artificial Sequence
  Description of Artificial Sequence: Synthetic polypeptide
DIVMTQSPLSLPVSLGERASISCRSSQSLVNSNGNTYLHWYQQKPGQSPKLLIYKVSNRASGVPDRFSGSGSGTDFTLKISRVEAEDVGVYYCQQGSHVPFTFGQGTKLEIK

SEQ ID NO: 440 - protein, 112 aa, Artificial Sequence
  Description of Artificial Sequence: Synthetic polypeptide
DIVMTQSPLSLPVSLGERASISCRSSQSLVHSNGKTYLHWYQQKPGQSPKLLIYKASNRASGVPDRFSGSGSGTDFTLKISRVEAEDVGVYYCQQGYHVPFTFGQGTKLEIK

SEQ ID NO: 441 - protein, 112 aa, Artificial Sequence
  Description of Artificial Sequence: Synthetic polypeptide
DIVMTQSPLSLPVSLGERASISCRSSQSLVNSDGNTYLEWYQQKPGQSPKLLIYKASNRASGVPDRFSGSGSGTDFTLKISRVEAEDVGVYYCQQSYHVPFTFGQGTKLEIK

SEQ ID NO: 442 - protein, 112 aa, Artificial Sequence
  Description of Artificial Sequence: Synthetic polypeptide
DIVMTQSPLSLPVSLGERASISCRSSQSLVNSDGNTYLHWYQQKPGQSPKLLIYKVSNRASGVPDRFSGSGSGTDFTLKISRVEAEDVGVYYCQQGYEYPFTFGQGTKLEIK

SEQ ID NO: 443 - protein, 112 aa, Artificial Sequence
  Description of Artificial Sequence: Synthetic polypeptide
DIVMTQSPLSLPVSLGERASISCRSSQSLVHSNGKTYLAWYQQKPGQSPKLLIYKASNRFSGVPDRFSGSGSGTDFTLKISRVEAEDVGVYYCQQSYSYALTFGQGTKLEIK

SEQ ID NO: 444 - protein, 112 aa, Artificial Sequence
  Description of Artificial Sequence: Synthetic polypeptide
DIVMTQSPLSLPVSLGERASISCRSSQSLVNSDGKTYLHWYQQKPGQSPKLLIYKASNRASGVPDRFSGSGSGTDFTLKISRVEAEDVGVYYCQQGSEVPFTFGQGTKLEIK

SEQ ID NO: 445 - protein, 112 aa, Artificial Sequence
  Description of Artificial Sequence: Synthetic polypeptide
DIVMTQSPLSLPVSLGERASISCRSSQSLVHSDGKTYLAWYQQKPGQSPKLLIYKVSNRASGVPDRFSGSGSGTDFTLKISRVEAEDVGVYYCQQSYSVPFTFGQGTKLEIK

SEQ ID NO: 446 - protein, 112 aa, Artificial Sequence
  Description of Artificial Sequence: Synthetic polypeptide
DIVMTQSPLSLPVSLGERASISCRSSQSLVHSDGKTYLHWYQQKPGQSPKLLIYKVSNRFSGVPDRFSGSGSGTDFTLKISRVEAEDVGVYYCFQGYSYPFTFGQGTKLEIK

SEQ ID NO: 447 - protein, 112 aa, Artificial Sequence
  Description of Artificial Sequence: Synthetic polypeptide
DIVMTQSPLSLPVSLGERASISCRSSQSLVHSDGNTYLAWYQQKPGQSPKLLIYKVSNRASGVPDRFSGSGSGTDFTLKISRVEAEDVGVYYCQQGSSYPLTFGQGTKLEIK

SEQ ID NO: 448 - protein, 112 aa, Artificial Sequence
  Description of Artificial Sequence: Synthetic polypeptide
DIVMTQSPLSLPVSLGERASISCRSSQSLVNSDGNTYLHWYQQKPGQSPKLLIYKVSNRFSGVPDRFSGSGSGTDFTLKISRVEAEDVGVYYCQQSYHTPFTFGQGTKLEIK

SEQ ID NO: 449 - protein, 112 aa, Artificial Sequence
  Description of Artificial Sequence: Synthetic polypeptide
DIVMTQSPLSLPVSLGERASISCRSSQSLVNSNGNTYLHWYQQKPGQSPKLLIYKASNRASGVPDRFSGSGSGTDFTLKISRVEAEDVGVYYCQQGYEYPLTFGQGTKLEIK

SEQ ID NO: 450 - protein, 112 aa, Artificial Sequence
  Description of Artificial Sequence: Synthetic polypeptide
DIVMTQSPLSLPVSLGERASISCRSSQSLVHSDGNTYLAWYQQKPGQSPKLLIYKVSNRASGVPDRFSGSGSGTDFTLKISRVEAEDVGVYYCQQSYSYPLTFGQGTKLEIK

SEQ ID NO: 451 - protein, 112 aa, Artificial Sequence
  Description of Artificial Sequence: Synthetic polypeptide
DIVMTQSPLSLPVSLGERASISCRSSQSLVHSNGNTYLHWYQQKPGQSPKLLIYKASNRASGVPDRFSGSGSGTDFTLKISRVEAEDVGVYYCQQGSEYPFTFGQGTKLEIK

SEQ ID NO: 452 - protein, 112 aa, Artificial Sequence
  Description of Artificial Sequence: Synthetic polypeptide
DIVMTQSPLSLPVSLGERASISCRSSQSLVHSNGKTYLEWYQQKPGQSPKLLIYKASNRASGVPDRFSGSGSGTDFTLKISRVEAEDVGVYYCFQSSSTPFTFGQGTKLEIK

SEQ ID NO: 453 - protein, 112 aa, Artificial Sequence
  Description of Artificial Sequence: Synthetic polypeptide
DIVMTQSPLSLPVSLGERASISCRSSQSLVHSDGKTYLAWYQQKPGQSPKLLIYKVSNRFSGVPDRFSGSGSGTDFTLKISRVEAEDVGVYYCQQSYSYPLTFGQGTKLEIK

SEQ ID NO: 454 - protein, 112 aa, Artificial Sequence
  Description of Artificial Sequence: Synthetic polypeptide
DIVMTQSPLSLPVSLGERASISCRSSQSLVHSDGNTYLEWYQQKPGQSPKLLIYKVSNRASGVPDRFSGSGSGTDFTLKISRVEAEDVGVYYCQQGYSVPFTFGQGTKLEIK

SEQ ID NO: 455 - protein, 112 aa, Artificial Sequence
  Description of Artificial Sequence: Synthetic polypeptide
DIVMTQSPLSLPVSLGERASISCRSSQSLVNSDGKTYLEWYQQKPGQSPKLLIYKASNRFSGVPDRFSGSGSGTDFTLKISRVEAEDVGVYYCQQSYSVPFTFGQGTKLEIK

SEQ ID NO: 456 - protein, 112 aa, Artificial Sequence
  Description of Artificial Sequence: Synthetic polypeptide
DIVMTQSPLSLPVSLGERASISCRSSQSLVHSNGNTYLHWYQQKPGQSPKLLIYKVSNRASGVPDRFSGSGSGTDFTLKISRVEAEDVGVYYCFQSSSYPFTFGQGTKLEIK

SEQ ID NO: 457 - protein, 112 aa, Artificial Sequence
  Description of Artificial Sequence: Synthetic polypeptide
DIVMTQSPLSLPVSLGERASISCRSSQSLVNSNGNTYLHWYQQKPGQSPKLLIYKASNRASGVPDRFSGSGSGTDFTLKISRVEAEDVGVYYCQQGYHVPFTFGQGTKLEIK

SEQ ID NO: 458 - protein, 112 aa, Artificial Sequence
  Description of Artificial Sequence: Synthetic polypeptide
DIVMTQSPLSLPVSLGERASISCRSSQSLVHSDGNTYLEWYQQKPGQSPKLLIYKVSNRFSGVPDRFSGSGSGTDFTLKISRVEAEDVGVYYCQQSYSTPFTFGQGTKLEIK

SEQ ID NO: 459 - protein, 112 aa, Artificial Sequence
  Description of Artificial Sequence: Synthetic polypeptide
DIVMTQSPLSLPVSLGERASISCRSSQSLVNSNGKTYLEWYQQKPGQSPKLLIYKVSNRASGVPDRFSGSGSGTDFTLKISRVEAEDVGVYYCQQSYHYPFTFGQGTKLEIK

SEQ ID NO: 460 - protein, 112 aa, Artificial Sequence
  Description of Artificial Sequence: Synthetic polypeptide
DIVMTQSPLSLPVSLGERASISCRSSQSLVHSDGNTYLHWYQQKPGQSPKLLIYKVSNRFSGVPDRFSGSGSGTDFTLKISRVEAEDVGVYYCQQSSHYPLTFGQGTKLEIK

SEQ ID NO: 461 - protein, 112 aa, Artificial Sequence
  Description of Artificial Sequence: Synthetic polypeptide
DIVMTQSPLSLPVSLGERASISCRSSQSLVHSDGKTYLAWYQQKPGQSPKLLIYKASNRFSGVPDRFSGSGSGTDFTLKISRVEAEDVGVYYYFQGSHTPFTFGQGTKLEIK

SEQ ID NO: 462 - protein, 112 aa, Artificial Sequence
  Description of Artificial Sequence: Synthetic polypeptide
DIVMTQSPLSLPVSLGERASISCRSSQSLVHSDGKTYLHWYQQKPGQSPKLLIYKASNRFSGVPDRFSGSGSGTDFTLKISRVEAEDVGVYYCFQGSSVPLTFGQGTKLEIK

SEQ ID NO: 463 - protein, 112 aa, Artificial Sequence
  Description of Artificial Sequence: Synthetic polypeptide
DIVMTQSPLSLPVSLGERASISCRSSQSLVNSNGNTYLEWYQQKPGQSPKLLIYKASNRFSGVPDRFSGSGSGTDFTLKISRVEAEDVGVYYCFQSYHVPFTFGQGTKLEIK

SEQ ID NO: 464 - protein, 112 aa, Artificial Sequence
  Description of Artificial Sequence: Synthetic polypeptide
DIVMTQSPLSLPVSLGERASISCRSSQSLVHSNGKTYLAWYQQKPGQSPKLLIYKASNRLSGVPDRFSGSGSGTDFTLKISRVEAEDVGVYYCQQSYSTPFTFGQGTKLEIK

SEQ ID NO: 465 - protein, 112 aa, Artificial Sequence
  Description of Artificial Sequence: Synthetic polypeptide
DIVMTQSPLSLPVSLGERASISCRSSQSLVNSNGNTYLHWYQQKPGQSPKLLIYKASNRASGVPDRFSGSGSGTDFTLKISRVEAEDVGVYYCQQGSEYPFTFGQGTKLEIK

SEQ ID NO: 466 - protein, 112 aa, Artificial Sequence
  Description of Artificial Sequence: Synthetic polypeptide
DIVMTQSPLSLPVSLGERASISCRSSQSLVNSDGKTYLHWYQQKPGQSPKLLIYKVSNRFSGVPDRFSGSGSGTDFTLKISRVEAEDVGVYYCQQSSHVPFTFGQGTKLEIK

SEQ ID NO: 467 - protein, 112 aa, Artificial Sequence
  Description of Artificial Sequence: Synthetic polypeptide
DIVMTQSPLSLPVSLGERASISCRSSQSLVNSDGNTYLAWYQQKPGQSPKLLIYKASNRASGVPDRFSGSGSGTDFTLKISRVEAEDVGVYYCQQGYSTPFTFGQGTKLEIK

SEQ ID NO: 468 - protein, 112 aa, Artificial Sequence
  Description of Artificial Sequence: Synthetic polypeptide
DIVMTQSPLSLPVSLGERASISCRSSQSLVNSDGNTYLHWYQQKPGQSPKLLIYKASNRASGVPDRFSGSGSGTDFTLKISRVEAEDVGVYYCQQGSEVPLTFGQGTKLEIK

SEQ ID NO: 469 - protein, 112 aa, Artificial Sequence
  Description of Artificial Sequence: Synthetic polypeptide
DIVMTQSPLSLPVSLGERASISCRSSQSLVHSNGKTYLAWYQQKPGQSPKLLIYKASNRFSGVPDRFSGSGSGTDFTLKISRVEAEDVGVYYCFQGYSTPLTFGQGTKLEIK

SEQ ID NO: 470 - protein, 112 aa, Artificial Sequence
  Description of Artificial Sequence: Synthetic polypeptide
DIVMTQSPLSLPVSLGERASISCRSSQSLVHSNGKTYLHWYQQKPGQSPKLLIYKVSNRASGVPDRFSGSGSGTDFTLKISRVEAEDVGVYYCFQSSEVPFTFGQGTKLEIK

SEQ ID NO: 471 - protein, 112 aa, Artificial Sequence
  Description of Artificial Sequence: Synthetic polypeptide
DIVMTQSPLSLPVSLGERASISCRSSQSLVNSDGNTYLEWYQQKPGQSPKLLIYKASNRFSGVPDRFSGSGSGTDFTLKISRVEAEDVGVYYCFQSSSVPLTFGQGTKLEIK

SEQ ID NO: 472 - protein, 112 aa, Artificial Sequence
  Description of Artificial Sequence: Synthetic polypeptide
DIVMTQSPLSLPVSLGERASISCRSSQSLVHSDGKTYLHWYQQKPGQSPKLLIYKASNRFSGVPDRFSGSGSGTDFTLKISRVEAEDVGVYYCQQGYSTPLTFGQGTKLEIK

SEQ ID NO: 473 - protein, 112 aa, Artificial Sequence
  Description of Artificial Sequence: Synthetic polypeptide
DIVMTQSPLSLPVSLGERASISCRSSQSLVHSNGNTYLAWYQQKPGQSPKLLIYKASNRFSGVPDRFSGSGSGTDFTLKISRVEAEDVGVYYCQQGSEVPLTFGQGTKLEIK

SEQ ID NO: 474 - protein, 112 aa, Artificial Sequence
  Description of Artificial Sequence: Synthetic polypeptide
DIVMTQSPLSLPVSLGERASISCRSSQSLVNSDGKTYLHWYQQKPGQSPKLLIYKASNRFSGVPDRFSGSGSGTDFTLKISRVEAEDVGVYYCQQGSHVPLTFGQGTKLEIK

SEQ ID NO: 475 - protein, 112 aa, Artificial Sequence
  Description of Artificial Sequence: Synthetic polypeptide
DIVMTQSPLSLPVSLGERASISCRSSQSLVHSNGNTYLHWYQQKPGQSPKLLIYKVSNRFSGVPDRFSGSGSGTDFTLKISRVEAEDVGVYYCQQGYSVPFTFGQGTKLEIK

SEQ ID NO: 476 - protein, 112 aa, Artificial Sequence
  Description of Artificial Sequence: Synthetic polypeptide
DIVMTQSPLSLPVSLGERASISCRSSQSLVNSDGKTYLEWYQQKPGQSPKLLIYKVSNRASGVPDRFSGSGSGTDFTLKISRVEAEDVGVYYCFQGYEYPLTFGQGTKLEIK

SEQ ID NO: 477 - protein, 112 aa, Artificial Sequence
  Description of Artificial Sequence: Synthetic polypeptide
DIVMTQSPLSLPVSLGERASISCRSSQSLVHSDGNTYLAWYQQKPGQSPKLLIYKASNRASGVPDRFSGSGSGTDFTLKISRVEAEDVGVYYCQQGYHYPLTFGQGTKLEIK

SEQ ID NO: 478 - protein, 112 aa, Artificial Sequence
  Description of Artificial Sequence: Synthetic polypeptide
DIVMTQSPLSLPVSLGERASISCRSSQSLVHSDGKTYLAWYQQKPGQSPKLLIYKASNRASGVPDRFSGSGSGTDFTLKISRVEAEDVGVYYCQQGYHVPFTFGQGTKLEIK

SEQ ID NO: 479 - protein, 112 aa, Artificial Sequence
  Description of Artificial Sequence: Synthetic polypeptide
DIVMTQSPLSLPVSLGERASISCRSSQSLVNSDGNTYLEWYQQKPGQSPKLLIYKVSNRFSGVPDRFSGSGSGTDFTLKISRVEAEDVGVYYCFQGSSYPFTFGQGTKLEIK

SEQ ID NO: 480 - protein, 112 aa, Artificial Sequence
  Description of Artificial Sequence: Synthetic polypeptide
DIVMTQSPLSLPVSLGERASISCRSSQSLVHSDGKTYLEWYQQKPGQSPKLLIYKVSNRASGVPDRFSGSGSGTDFTLKISRVEAEDVGVYYCFQSYHYPLTFGQGTKLEIK

SEQ ID NO: 481 - protein, 112 aa, Artificial Sequence
  Description of Artificial Sequence: Synthetic polypeptide
DIVMTQSPLSLPVSLGERASISCRSSQSLVHSDGKTYLAWYQQKPGQSPKLLIYKVSNRFSGVPDRFSGSGSGTDFTLKISRVEAEDVGVYYCQQSSHTPFTFGQGTKLEIK

SEQ ID NO: 482 - protein, 112 aa, Artificial Sequence
  Description of Artificial Sequence: Synthetic polypeptide
DIVMTQSPLSLPVSLGERASISCRSSQSLVHSDGKTYLHWYQQKPGQSPKLLIYKASNRASGVPDRFSGSGSGTDFTLKISRVEAEDVGVYYCQQGYEYPFTFGQGTKLEIK

SEQ ID NO: 483 - protein, 112 aa, Artificial Sequence
  Description of Artificial Sequence: Synthetic polypeptide
DIVMTQSPLSLPVSLGERASISCRSSQSLVHSNGKTYLAWYQQKPGQSPKLLIYKVSNRFSGVPDRFSGSGSGTDFTLKISRVEAEDVGVYYCQQGYEVPLTFGQGTKLEIK

SEQ ID NO: 484 - protein, 112 aa, Artificial Sequence
  Description of Artificial Sequence: Synthetic polypeptide
DIVMTQSPLSLPVSLGERASISCRSSQSLVNSNGKTYLAWYQQKPGQSPKLLIYKASNRFSGVPDRFSGSGSGTDFTLKISRVEAEDVGVYYCQQSYHYPFTFGQGTKLEIK

SEQ ID NO: 485 - protein, 112 aa, Artificial Sequence
  Description of Artificial Sequence: Synthetic polypeptide
DIVMTQSPLSLPVSLGERASISCRSSQSLVHSNGNTYLAWYQQKPGQSPKLLIYKASNRFSGVPDRFSGSGSGTDFTLKISRVEAEDVGVYYCQQGYSVPFTFGQGTKLEIK

SEQ ID NO: 486 - protein, 112 aa, Artificial Sequence
  Description of Artificial Sequence: Synthetic polypeptide
DIVMTQSPLSLPVSLGERASISCRSSQSLVNSNGKTYLHWYQQKPGQSPKLLIYKVSNRFSGVPDRFSGSGSGTDFTLKISRVEAEDVGVYYCFQSSHTPLTFGQGTKLEIK

SEQ ID NO: 487 - protein, 112 aa, Artificial Sequence
  Description of Artificial Sequence: Synthetic polypeptide
DIVMTQSPLSLPVSLGERASISCRSSQSLVHSDGNTYLAWYQQKPGQSPKLLIYKVSNRFSGVPDRFSGSGSGTDFTLKISRVEAEDVGVYYCFQSSSTPLTFGQGTKLEIK

SEQ ID NO: 488 - protein, 112 aa, Artificial Sequence
  Description of Artificial Sequence: Synthetic polypeptide
DIVMTQSPLSLPVSLGERASISCRSSQSLVNSDGNTYLAWYQQKPGQSPKLLIYKVSNRFSGVPDRFSGSGSGTDFTLKISRVEAEDVGVYYCFQSSEYPLTFGQGTKLEIK

SEQ ID NO: 489 - protein, 112 aa, Artificial Sequence
  Description of Artificial Sequence: Synthetic polypeptide
DIVMTQSPLSLPVSLGERASISCRSSQSLVHSNGKTYLAWYQQKPGQSPKLLIYKASNRFSGVPDRFSGSGSGTDFTLKISRVEAEDVGVYYCFQSYHTPFTFGQGTKLEIK

SEQ ID NO: 490 - protein, 112 aa, Artificial Sequence
  Description of Artificial Sequence: Synthetic polypeptide
DIVMTQSPLSLPVSLGERASISCRSSQSLVHSNGNTYLAWYQQKPGQSPKLLIYKVSNRASGVPDRFSGSGSGTDFTLKISRVEAEDVGVYYCQQSYSYPLTFGQGTKLEIK

SEQ ID NO: 491 - protein, 112 aa, Artificial Sequence
  Description of Artificial Sequence: Synthetic polypeptide
DIVMTQSPLSLPVSLGERASISCRSSQSLVNSDGKTYLAWYQQKPGQSPKLLIYKASNRASGVPDRFSGSGSGTDFTLKISRVEAEDVGVYYCFQSSHVPFTFGQGTKLEIK

SEQ ID NO: 492 - protein, 112 aa, Artificial Sequence
  Description of Artificial Sequence: Synthetic polypeptide
DIVMTQSPLSLPVSLGERASISCRSSQSLVNINGKTYLHWYQQKPGQSPKLLIYKASNRFSGVPDRFSGSGSGTDFTLKISRVEAEDVGVYYCQQGSETPFTFGQGTKLEIK

SEQ ID NO: 493 - protein, 112 aa, Artificial Sequence
  Description of Artificial Sequence: Synthetic polypeptide
DIVMTQSPLSLPVSLGERASISCRSSQSLVHSNGNTYLEWYQQKPGQSPKLLIYKASNRASGVPDRFSGSGSGTDFTLKISRVEAEDVGVYYCQQSSSYPFTFGQGTKLEIK

SEQ ID NO: 494 - protein, 112 aa, Artificial Sequence; identical to SEQ ID NO: 451
  Description of Artificial Sequence: Synthetic polypeptide

SEQ ID NO: 495 - protein, 112 aa, Artificial Sequence
  Description of Artificial Sequence: Synthetic polypeptide
DIVMTQSPLSLPVSLGERASISCRSSQSLVNSDGKTYLEWYQQKPGQSPKLLIYKVSNRASGVPDRFSGSGSGTDFTLKISRVEAEDVGVYYCFQGSSYPLTFGQGTKLEIK

SEQ ID NO: 496 - protein, 112 aa, Artificial Sequence
  Description of Artificial Sequence: Synthetic polypeptide
DIVMTQSPLSLPVSLGERASISCRSSQSLVNSNGNTYLEWYQQKPGQSPKLLIYKASNRASGVPDRFSGSGSGTDFTLKISRVEAEDVGVYYCFQGSEVPLTFGQGTKLEIK

SEQ ID NO: 497 - protein, 112 aa, Artificial Sequence
  Description of Artificial Sequence: Synthetic polypeptide
DIVMTQSPLSLPVSLGERASISCRSSQSLVNSDGNTYLAWYQQKPGQSPKLLIYKASNRASGVPDRFSGSGSGTDFTLKISRVEAEDVGVYYCQQSSEYPLTFGQGTKLEIK

SEQ ID NO: 498 - protein, 112 aa, Artificial Sequence
  Description of Artificial Sequence: Synthetic polypeptide
DIVMTQSPLSLPVSLGERASISCRSSQSLVNSNGNTYLHWYQQKPGQSPKLLIYKASNRASGVPDRFSGSGSGTDFTLKISRVEAEDVGVYYCQQSYHTPLTFGQGTKLEIK

SEQ ID NO: 499 - protein, 112 aa, Artificial Sequence
  Description of Artificial Sequence: Synthetic polypeptide
DIVMTQSPLSLPVSLGERASISCRSSQSLVHSNGKTYLEWYQQKPGQSPKLLIYKASNRFSGVPDRFSGSGSGTDFTLKISRVEAEDVGVYYCQQGSSYPLTFGQGTKLEIK

SEQ ID NO: 500 - protein, 112 aa, Artificial Sequence
  Description of Artificial Sequence: Synthetic polypeptide
DIVMTQSPLSLPVSLGERASISCRSSQSLVHSNGKTYLEWYQQKPGQSPKLLIYKVSNRASGVPDRFSGSGSGTDFTLKISRVEAEDVGVYYCQQSYSVPFTFGQGTKLEIK

SEQ ID NO: 501 - protein, 112 aa, Artificial Sequence
  Description of Artificial Sequence: Synthetic polypeptide
DIVMTQSPLSLPVSLGERASISCRSSQSLVHSDGKTYLHWYQQKPGQSPKLLIYKVSNRASGVPDRFSGSGSGTDFTLKISRVEAEDVGVYYCQQSSHYPLTFGQGTKLEIK

SEQ ID NO: 502 - protein, 112 aa, Artificial Sequence
  Description of Artificial Sequence: Synthetic polypeptide
DIVMTQSPLSLPVSLGERASISCRSSQSLVHSDGNTYLAWYQQKPGQSPKLLIYKASNRFSGVPDRFSGSGSGTDFTLKISRVEAEDVGVYYCQQGYEVPFTFGQGTKLEIK

SEQ ID NO: 503 - protein, 112 aa, Artificial Sequence
  Description of Artificial Sequence: Synthetic polypeptide
DIVMTQSPLSLPVSLGERASISCRSSQSLVHSDGKTYLHWYQQKPGQSPKLLIYKVSNRASGVPDRFSGSGSGTDFTLKISRVEAEDVGVYYCQQGSETPLTFGQGTKLEIK

SEQ ID NO: 504 - protein, 112 aa, Artificial Sequence
  Description of Artificial Sequence: Synthetic polypeptide
DIVMTQSPLSLPVSLGERASISCRSSQSLVNSDGKTYLAWYQQKPGQSPKLLIYKASNRASGVPDRFSGSGSGTDFTLKISRVEAEDVGVYYCFQGYNTPFTFGQGTKVEIK

SEQ ID NO: 505 - protein, 112 aa, Artificial Sequence
  Description of Artificial Sequence: Synthetic polypeptide
DIVMTQSPLSLPVSLGERASISCRSSQSLVNSNGKTYLEWYQQKPGQSPKLLIYKASNRFSGVPDRFSGSGSGTDFTLKISRVEAEDVGVYYCFQGYETPLTFGQGTKLEIK

SEQ ID NO: 506 - protein, 112 aa, Artificial Sequence
  Description of Artificial Sequence: Synthetic polypeptide
DIVMTQSPLSLPVSLGERASISCRSSQSLVNSDGNTYLAWYQQKPGQSPKLLIYKASNRASGVPDRFSGSGSGTDFTLKISRVEAEDVGVYYCFQSSETPFTFGQGTKLEIK

SEQ ID NO: 507 - protein, 112 aa, Artificial Sequence; identical to SEQ ID NO: 420
  Description of Artificial Sequence: Synthetic polypeptide

SEQ ID NO: 508 - protein, 112 aa, Artificial Sequence
  Description of Artificial Sequence: Synthetic polypeptide
DIVMTQSPLSLPVSLGERASISCRSSQSLVHSDGNTYLEWYQQKPGQSPKLLIYKVSNRASGVPDRFSGSGSGTDFTLKISRVEAEDVGVYYCFQSYSVPLTFGQGTKLEIK

SEQ ID NO: 509 - protein, 112 aa, Artificial Sequence
  Description of Artificial Sequence: Synthetic polypeptide
DIVMTQSPLSLPVSLGERASISCRSSQSLVNSDGKTYLAWYQQKPGQSPKLLIYKVSNRASGVPDRFSGSGSGTDFTLKISRVEAEDVGVYYCFQSYSVPFTFGQGTKLEIK

SEQ ID NO: 510 - protein, 112 aa, Artificial Sequence
  Description of Artificial Sequence: Synthetic polypeptide
DIVMTQSPLSLPVSLGERASISCRSSQSLVNSDGKTYLEWYQQKPGQSPKLLIYKASNRASGVPDRFSGSGSGTDFTLKISRVEAEDVGVYYCFQSYSTPFTFGQGTKLEIK

SEQ ID NO: 511 - protein, 112 aa, Artificial Sequence
  Description of Artificial Sequence: Synthetic polypeptide
DIVMTQSPLSLPVSLGERASISCRSSQSLVHSNGKTYLHWYQQKPGQSPKLLIYKASNRASGVPDRFSGSGSGTDFTLKISRVEAEDVGVYYCQQGSSVPLTFGQGTKLEIK

SEQ ID NO: 512 - protein, 112 aa, Artificial Sequence
  Description of Artificial Sequence: Synthetic polypeptide
DIVMTQSPLSLPVSLGERASISCRSSQSLVNSNGKTYLAWYQQKPGQSPKLLIYKASNRASGVPDRFSGSGSGTDFTLKISRVEAEDVGVYYCQQGSETPLTFGQGTKLEIK

SEQ ID NO: 513 - protein, 112 aa, Artificial Sequence
  Description of Artificial Sequence: Synthetic polypeptide
DIVMTQSPLSLPVSLGERASISCRSSQSLVHSNGKTYLAWYQQKPGQSPKLLIYKASNRASGVPDRFSGSGSGTDFTLKISRVEAEDVGVYYCFQGSEYPLTFGQGTKLEIK

SEQ ID NO: 514 - protein, 112 aa, Artificial Sequence
  Description of Artificial Sequence: Synthetic polypeptide
DIVMTQSPLSLPVSLGERASISCRSSQSLVHSDGKTYLHWYQQKPGQSPKLLIYKVSNRFSGVPDRFSGSGSGTDFTLKISRVEAEDVGVYYCFQGSETPLTFGQGTKLEIK

SEQ ID NO: 515 - protein, 112 aa, Artificial Sequence
  Description of Artificial Sequence: Synthetic polypeptide
DIVMTQSPLSLPVSLGERASISCRSSQSLVNSNGKTYLAWYQQKPGQSPKLLIYKASNRFSGVPDRFSGSGSGTDFTLKISRVEAEDVGVYYCQQSSEYPFTFGQGTKLEIK

SEQ ID NO: 516 - protein, 112 aa, Artificial Sequence
  Description of Artificial Sequence: Synthetic polypeptide
DIVMTQSPLSLPVSLGERASISCRSSQSLVHSNGKTYLEWYQQKPGQSPKLLIYKVSNRFSGVPDRFSGSGSGTDFTLKISRVEAEDVGVYYCQQSYHVPFTFGQGTKLEIK

SEQ ID NO: 517 - protein, 112 aa, Artificial Sequence
  Description of Artificial Sequence: Synthetic polypeptide
DIVMTQSPLSLPVSLGERASISCRSSQSLVHSDGKTYLHWYQQKPGQSPKLLIYKASNRFSGVPDRFSGSGSGTDFTLKISRVEAEDVGVYYCQQSSEVPFTFGQGTKLEIK

SEQ ID NO: 518 - protein, 112 aa, Artificial Sequence
  Description of Artificial Sequence: Synthetic polypeptide
RYSLTQSPLSLPVSLGERASISCRSSQSLVHSNGNTYLHWYQQKPGQSPKLLIYKASNRASGVPDRFSGSGSGTDFTLKISRVEAEDVGVYYCQQGSHTPLTFGQGTKLEIK

SEQ ID NO: 519 - protein, 112 aa, Artificial Sequence
  Description of Artificial Sequence: Synthetic polypeptide
DIVMTQSPLSLPVSLGERASISCRSSQSLVHSNGNTYLAWYQQKPGQSPKLLIYKASNRFSGVPDRFSGSGSGTDFTLKISRVEAEDVGVYYCQQSYSYPFTFGQGTKLEIK

SEQ ID NO: 520 - protein, 112 aa, Artificial Sequence
  Description of Artificial Sequence: Synthetic polypeptide
DIVMTQSPLSLPVSLGERASISCRSSQSLVHSNGNTYLHWYQQKPGQSPKLLIYKASNRASGVPDRFSGSGSGTDFTLKISRVEAEDVGVYYCQQSSHYPFTFGQGTKLEIK

SEQ ID NO: 521 - protein, 112 aa, Artificial Sequence; identical to SEQ ID NO: 506
  Description of Artificial Sequence: Synthetic polypeptide

SEQ ID NO: 522 - protein, 107 aa, Artificial Sequence
  Description of Artificial Sequence: Synthetic polypeptide
DIQMTQSPSSLSASVGDRVTITCRTSQSISIYLNWYQQKPGKAPKLLIYAASRVQSGVPSRFSGSGSGTDFTLTISSLQPEDFATYYCQESYSIPFTFGGGTKVEIK

SEQ ID NO: 523 - protein, 107 aa, Artificial Sequence
  Description of Artificial Sequence: Synthetic polypeptide
QSVLTQPPSVSAAPGQKVTISCSGSSSNIENNDVSWYQQLPGTAPKLLIYQNNERPSGIPDRFSGSKSGTSATLGITGLQTGDEADYYCATWDRSLSVVFGGGTKLT

SEQ ID NO: 524 - protein, 107 aa, Artificial Sequence
  Description of Artificial Sequence: Synthetic polypeptide
DIQMTQSPSSLSASVGDRVTITCRASQSIYNYLNWYQQKPGKAPKLLIYAASGLQSGVPSRFSGSGSGTDFTLTISSLQPEDFATYYCQQSFNTPLTFGGGTKVEIK

SEQ ID NO: 525 - protein, 112 aa, Artificial Sequence
  Description of Artificial Sequence: Synthetic polypeptide
DIVMTQAAPSVAVTPGASVSISCRSSKSLLHSSGKTYLYWFLQRPGQSPQLLIYRLSSLASGVPDRFSGSGSGTAFTLRISRVEAEDVGVYYCMQHLEYPYTFGGGTKLEIK

SEQ ID NO: 526 - protein, 7 aa, Artificial Sequence
  Description of Artificial Sequence: Synthetic peptide
GFTFSDY

SEQ ID NO: 527 - protein, 7 aa, Artificial Sequence
  Description of Artificial Sequence: Synthetic peptide
GRAFIAY

SEQ ID NO: 528 - protein, 7 aa, Artificial Sequence
  Description of Artificial Sequence: Synthetic peptide
GFTFSSY

SEQ ID NO: 529 - protein, 7 aa, Artificial Sequence
  Description of Artificial Sequence: Synthetic peptide
GGTFSSY

SEQ ID NO: 530 - protein, 7 aa, Artificial Sequence
  Description of Artificial Sequence: Synthetic peptide
GGTFSLY

SEQ ID NO: 531 - protein, 7 aa, Artificial Sequence
  Description of Artificial Sequence: Synthetic peptide
GFTFSSY

SEQ ID NO: 532 - protein, 7 aa, Artificial Sequence
  Description of Artificial Sequence: Synthetic peptide
GRAFIAY

SEQ ID NO: 533 - protein, 7 aa, Artificial Sequence
  Description of Artificial Sequence: Synthetic peptide
GGTFSDY

SEQ ID NO: 534 - protein, 7 aa, Artificial Sequence
  Description of Artificial Sequence: Synthetic peptide
GFTFSDY

SEQ ID NO: 535 - protein, 7 aa, Artificial Sequence
  Description of Artificial Sequence: Synthetic peptide
GRAFIAY

SEQ ID NO: 536 - protein, 7 aa, Artificial Sequence
  Description of Artificial Sequence: Synthetic peptide
GRAFIAY

SEQ ID NO: 537 - protein, 7 aa, Artificial Sequence
  Description of Artificial Sequence: Synthetic peptide
GFTFSDY

SEQ ID NO: 538 - protein, 7 aa, Artificial Sequence
  Description of Artificial Sequence: Synthetic peptide
GFTFSDY

SEQ ID NO: 539 - protein, 7 aa, Artificial Sequence
  Description of Artificial Sequence: Synthetic peptide
GFTFSNY

SEQ ID NO: 540 - protein, 7 aa, Artificial Sequence
  Description of Artificial Sequence: Synthetic peptide
GGTFSLY

SEQ ID NO: 541 - protein, 7 aa, Artificial Sequence
  Description of Artificial Sequence: Synthetic peptide
GFTFSDY

SEQ ID NO: 542 - protein, 7 aa, Artificial Sequence
  Description of Artificial Sequence: Synthetic peptide
GFTFSNY

SEQ ID NO: 543 - protein, 7 aa, Artificial Sequence
  Description of Artificial Sequence: Synthetic peptide
GGTFSDY

SEQ ID NO: 544 - protein, 7 aa, Artificial Sequence
  Description of Artificial Sequence: Synthetic peptide
GFTFSSY

SEQ ID NO: 545 - protein, 7 aa, Artificial Sequence
  Description of Artificial Sequence: Synthetic peptide
GFTFSDY

SEQ ID NO: 546 - protein, 7 aa, Artificial Sequence
  Description of Artificial Sequence: Synthetic peptide
GFTFSDY

SEQ ID NO: 547 - protein, 7 aa, Artificial Sequence
  Description of Artificial Sequence: Synthetic peptide
GFTFSDY

SEQ ID NO: 548 - protein, 7 aa, Artificial Sequence
  Description of Artificial Sequence: Synthetic peptide
GGTFSSY

SEQ ID NO: 549 - protein, 7 aa, Artificial Sequence
  Description of Artificial Sequence: Synthetic peptide
GFTFSSY

SEQ ID NO: 550 - protein, 7 aa, Artificial Sequence
  Description of Artificial Sequence: Synthetic peptide
GGTFSSY

SEQ ID NO: 551 - protein, 7 aa, Artificial Sequence
  Description of Artificial Sequence: Synthetic peptide
GFTFSSY

SEQ ID NO: 552 - protein, 7 aa, Artificial Sequence
  Description of Artificial Sequence: Synthetic peptide
GFTFSDY

SEQ ID NO: 553 - protein, 7 aa, Artificial Sequence
  Description of Artificial Sequence: Synthetic peptide
GFTFSNY

SEQ ID NO: 554 - protein, 7 aa, Artificial Sequence
  Description of Artificial Sequence: Synthetic peptide
GGTFSNY

SEQ ID NO: 555 - protein, 7 aa, Artificial Sequence
  Description of Artificial Sequence: Synthetic peptide
GGTFSSY

SEQ ID NO: 556 - protein, 7 aa, Artificial Sequence
  Description of Artificial Sequence: Synthetic peptide
GFTFSDY

SEQ ID NO: 557 - protein, 7 aa, Artificial Sequence
  Description of Artificial Sequence: Synthetic peptide
GFTFSDY

SEQ ID NO: 558 - protein, 7 aa, Artificial Sequence
  Description of Artificial Sequence: Synthetic peptide
GGTFSNY

SEQ ID NO: 559 - protein, 7 aa, Artificial Sequence
  Description of Artificial Sequence: Synthetic peptide
GGTFSDY

SEQ ID NO: 560 - protein, 7 aa, Artificial Sequence
  Description of Artificial Sequence: Synthetic peptide
GFTFSSY

SEQ ID NO: 561 - protein, 7 aa, Artificial Sequence
  Description of Artificial Sequence: Synthetic peptide
GGTFSSY

SEQ ID NO: 562 - protein, 7 aa, Artificial Sequence
  Description of Artificial Sequence: Synthetic peptide
GFTFSDY

SEQ ID NO: 563 - protein, 7 aa, Artificial Sequence
  Description of Artificial Sequence: Synthetic peptide
GFTFSNY

SEQ ID NO: 564 - protein, 7 aa, Artificial Sequence
  Description of Artificial Sequence: Synthetic peptide
GFTFSDY

SEQ ID NO: 565 - protein, 7 aa, Artificial Sequence
  Description of Artificial Sequence: Synthetic peptide
GFTFSSY

SEQ ID NO: 566 - protein, 7 aa, Artificial Sequence
  Description of Artificial Sequence: Synthetic peptide
GGTFSSY

SEQ ID NO: 567 - protein, 7 aa, Artificial Sequence
  Description of Artificial Sequence: Synthetic peptide
GGTFSSY

SEQ ID NO: 568 - protein, 7 aa, Artificial Sequence
  Description of Artificial Sequence: Synthetic peptide
GGTFSDY

SEQ ID NO: 569 - protein, 7 aa, Artificial Sequence
  Description of Artificial Sequence: Synthetic peptide
GFTFSDY

SEQ ID NO: 570 - protein, 7 aa, Artificial Sequence
  Description of Artificial Sequence: Synthetic peptide
GFTFSDY

SEQ ID NO: 571 - protein, 7 aa, Artificial Sequence
  Description of Artificial Sequence: Synthetic peptide
GFTFSDY

SEQ ID NO: 572 - protein, 7 aa, Artificial Sequence
  Description of Artificial Sequence: Synthetic peptide
GFTFSNY

SEQ ID NO: 573 - protein, 7 aa, Artificial Sequence
  Description of Artificial Sequence: Synthetic peptide
GFTFSNY

SEQ ID NO: 574 - protein, 7 aa, Artificial Sequence
  Description of Artificial Sequence: Synthetic peptide
GFTFSDY

SEQ ID NO: 575 - protein, 7 aa, Artificial Sequence
  Description of Artificial Sequence: Synthetic peptide
GFTFSDY

SEQ ID NO: 576 - protein, 7 aa, Artificial Sequence
  Description of Artificial Sequence: Synthetic peptide
GFTFSNY

SEQ ID NO: 577 - protein, 7 aa, Artificial Sequence
  Description of Artificial Sequence: Synthetic peptide
GGTFSSY

SEQ ID NO: 578 - protein, 7 aa, Artificial Sequence
  Description of Artificial Sequence: Synthetic peptide
GGTFSDY

SEQ ID NO: 579 - protein, 7 aa, Artificial Sequence
  Description of Artificial Sequence: Synthetic peptide
GFTFSDY

SEQ ID NO: 580 - protein, 7 aa, Artificial Sequence
  Description of Artificial Sequence: Synthetic peptide
GFTFSDY

SEQ ID NO: 581 - protein, 7 aa, Artificial Sequence
  Description of Artificial Sequence: Synthetic peptide
GGTFSNY

SEQ ID NO: 582 - protein, 7 aa, Artificial Sequence
  Description of Artificial Sequence: Synthetic peptide
GGTFSSY

SEQ ID NO: 583 - protein, 7 aa, Artificial Sequence
  Description of Artificial Sequence: Synthetic peptide
GFTFSSY

SEQ ID NO: 584 - protein, 7 aa, Artificial Sequence
  Description of Artificial Sequence: Synthetic peptide
GGTFSSY

SEQ ID NO: 585 - protein, 7 aa, Artificial Sequence
  Description of Artificial Sequence: Synthetic peptide
GGTFSDY

SEQ ID NO: 586 - protein, 7 aa, Artificial Sequence
  Description of Artificial Sequence: Synthetic peptide
GFTFSNY

SEQ ID NO: 587 - protein, 7 aa, Artificial Sequence
  Description of Artificial Sequence: Synthetic peptide
GGTFSSY

SEQ ID NO: 588 - protein, 7 aa, Artificial Sequence
  Description of Artificial Sequence: Synthetic peptide
GFTFSSY

SEQ ID NO: 589 - protein, 7 aa, Artificial Sequence
  Description of Artificial Sequence: Synthetic peptide
GFTFSSY

SEQ ID NO: 590 - protein, 7 aa, Artificial Sequence
  Description of Artificial Sequence: Synthetic peptide
GFTFSSY

SEQ ID NO: 591 - protein, 7 aa, Artificial Sequence
  Description of Artificial Sequence: Synthetic peptide
GFTFSDY

SEQ ID NO: 592 - protein, 7 aa, Artificial Sequence
  Description of Artificial Sequence: Synthetic peptide
GGTFSNY

SEQ ID NO: 593 - protein, 7 aa, Artificial Sequence
  Description of Artificial Sequence: Synthetic peptide
GFTFSSY

SEQ ID NO: 594 - protein, 7 aa, Artificial Sequence
  Description of Artificial Sequence: Synthetic peptide
GFTFSDY

SEQ ID NO: 595 - protein, 7 aa, Artificial Sequence
  Description of Artificial Sequence: Synthetic peptide
GGTFSSY

SEQ ID NO: 596 - protein, 7 aa, Artificial Sequence
  Description of Artificial Sequence: Synthetic peptide
GFTFSSY

SEQ ID NO: 597 - protein, 7 aa, Artificial Sequence
  Description of Artificial Sequence: Synthetic peptide
GFTFSSY

SEQ ID NO: 598 - protein, 7 aa, Artificial Sequence
  Description of Artificial Sequence: Synthetic peptide
GFTFSNY

SEQ ID NO: 599 - protein, 7 aa, Artificial Sequence
  Description of Artificial Sequence: Synthetic peptide
GGTFSSY

SEQ ID NO: 600 - protein, 7 aa, Artificial Sequence
  Description of Artificial Sequence: Synthetic peptide
GGTFSSY

SEQ ID NO: 601 - protein, 7 aa, Artificial Sequence
  Description of Artificial Sequence: Synthetic peptide
GFTFSNY

SEQ ID NO: 602 - protein, 7 aa, Artificial Sequence
  Description of Artificial Sequence: Synthetic peptide
GFTFSNY

SEQ ID NO: 603 - protein, 7 aa, Artificial Sequence
  Description of Artificial Sequence: Synthetic peptide
GGTFSSY

SEQ ID NO: 604 - protein, 7 aa, Artificial Sequence
  Description of Artificial Sequence: Synthetic peptide
GFTFSSY

SEQ ID NO: 605 - protein, 7 aa, Artificial Sequence
  Description of Artificial Sequence: Synthetic peptide
GFTFSDY

SEQ ID NO: 606 - protein, 7 aa, Artificial Sequence
  Description of Artificial Sequence: Synthetic peptide
GFTFSDY

SEQ ID NO: 607 - protein, 7 aa, Artificial Sequence
  Description of Artificial Sequence: Synthetic peptide
GFTFSDY

SEQ ID NO: 608 - protein, 7 aa, Artificial Sequence
  Description of Artificial Sequence: Synthetic peptide
GFTFSDY

SEQ ID NO: 609 - protein, 7 aa, Artificial Sequence
  Description of Artificial Sequence: Synthetic peptide
GFTFSSY

SEQ ID NO: 610 - protein, 7 aa, Artificial Sequence
  Description of Artificial Sequence: Synthetic peptide
GGTFSNY

SEQ ID NO: 611 - protein, 7 aa, Artificial Sequence
  Description of Artificial Sequence: Synthetic peptide
GFTFSNY

SEQ ID NO: 612 - protein, 7 aa, Artificial Sequence
  Description of Artificial Sequence: Synthetic peptide
GGTFSSY

SEQ ID NO: 613 - protein, 7 aa, Artificial Sequence
  Description of Artificial Sequence: Synthetic peptide
GFTFSDY

SEQ ID NO: 614 - protein, 7 aa, Artificial Sequence
  Description of Artificial Sequence: Synthetic peptide
GFTFSSY

SEQ ID NO: 615 - protein, 7 aa, Artificial Sequence
  Description of Artificial Sequence: Synthetic peptide
GFTFSDY

SEQ ID NO: 616 - protein, 7 aa, Artificial Sequence
  Description of Artificial Sequence: Synthetic peptide
GGTFSNY

SEQ ID NO: 617 - protein, 7 aa, Artificial Sequence
  Description of Artificial Sequence: Synthetic peptide
GFTFSNY

SEQ ID NO: 618 - protein, 7 aa, Artificial Sequence
  Description of Artificial Sequence: Synthetic peptide
GGTFSNY

SEQ ID NO: 619 - protein, 7 aa, Artificial Sequence
  Description of Artificial Sequence: Synthetic peptide
GFTFSSY

SEQ ID NO: 620 - protein, 7 aa, Artificial Sequence
  Description of Artificial Sequence: Synthetic peptide
GGTFSSY

SEQ ID NO: 621 - protein, 7 aa, Artificial Sequence
  Description of Artificial Sequence: Synthetic peptide
GFTFSSY

SEQ ID NO: 622 - protein, 7 aa, Artificial Sequence
  Description of Artificial Sequence: Synthetic peptide
GFTFSNY

SEQ ID NO: 623 - protein, 7 aa, Artificial Sequence
  Description of Artificial Sequence: Synthetic peptide
GFTFSDY

SEQ ID NO: 624 - protein, 7 aa, Artificial Sequence
  Description of Artificial Sequence: Synthetic peptide
GGTFSDY

SEQ ID NO: 625 - protein, 7 aa, Artificial Sequence
  Description of Artificial Sequence: Synthetic peptide
GFTFSDY

SEQ ID NO: 626 - protein, 7 aa, Artificial Sequence
  Description of Artificial Sequence: Synthetic peptide
GGTFSSY

SEQ ID NO: 627 - protein, 7 aa, Artificial Sequence
  Description of Artificial Sequence: Synthetic peptide
GFTFSNY

SEQ ID NO: 628 - protein, 7 aa, Artificial Sequence
  Description of Artificial Sequence: Synthetic peptide
GFTFSDY

SEQ ID NO: 629 - protein, 7 aa, Artificial Sequence
  Description of Artificial Sequence: Synthetic peptide
GGTFSNY

SEQ ID NO: 630 - protein, 7 aa, Artificial Sequence
  Description of Artificial Sequence: Synthetic peptide
GGTFSSY

SEQ ID NO: 631 - protein, 7 aa, Artificial Sequence
  Description of Artificial Sequence: Synthetic peptide
GFTFSSY

SEQ ID NO: 632 - protein, 7 aa, Artificial Sequence
  Description of Artificial Sequence: Synthetic peptide
GGTFSSY

SEQ ID NO: 633 - protein, 7 aa, Artificial Sequence
  Description of Artificial Sequence: Synthetic peptide
GGTFSDY

SEQ ID NO: 634 - protein, 7 aa, Artificial Sequence
  Description of Artificial Sequence: Synthetic peptide
GGTFSNY

SEQ ID NO: 635 - protein, 7 aa, Artificial Sequence
  Description of Artificial Sequence: Synthetic peptide
GGTFSDY

SEQ ID NO: 636 - protein, 7 aa, Artificial Sequence
  Description of Artificial Sequence: Synthetic peptide
GGTFSDY

SEQ ID NO: 637 - protein, 7 aa, Artificial Sequence
  Description of Artificial Sequence: Synthetic peptide
GFTFSSY

SEQ ID NO: 638 - protein, 7 aa, Artificial Sequence
  Description of Artificial Sequence: Synthetic peptide
GGTFSNY

SEQ ID NO: 639 - protein, 7 aa, Artificial Sequence
  Description of Artificial Sequence: Synthetic peptide
GGTFSNY

SEQ ID NO: 640 - protein, 3 aa, Artificial Sequence
  Description of Artificial Sequence: Synthetic peptide
GFT

SEQ ID NO: 641 - protein, 7 aa, Artificial Sequence
  Description of Artificial Sequence: Synthetic peptide
GGTFSDY

SEQ ID NO: 642 - protein, 7 aa, Artificial Sequence
  Description of Artificial Sequence: Synthetic peptide
GFTFSSY

SEQ ID NO: 643 - protein, 7 aa, Artificial Sequence
  Description of Artificial Sequence: Synthetic peptide
GFTFSSY

SEQ ID NO: 644 - protein, 7 aa, Artificial Sequence
  Description of Artificial Sequence: Synthetic peptide
GGTFSSY

SEQ ID NO: 645 - protein, 7 aa, Artificial Sequence
  Description of Artificial Sequence: Synthetic peptide
GFTFSDY

SEQ ID NO: 646 - protein, 7 aa, Artificial Sequence
  Description of Artificial Sequence: Synthetic peptide
GFTFSSY

SEQ ID NO: 647 - protein, 7 aa, Artificial Sequence
  Description of Artificial Sequence: Synthetic peptide
GFTFSNY

SEQ ID NO: 648 - protein, 7 aa, Artificial Sequence
  Description of Artificial Sequence: Synthetic peptide
GFTFSNY

SEQ ID NO: 649 - protein, 7 aa, Artificial Sequence
  Description of Artificial Sequence: Synthetic peptide
GFTFSNY

SEQ ID NO: 650 - protein, 7 aa, Artificial Sequence
  Description of Artificial Sequence: Synthetic peptide
GFTFSDY

SEQ ID NO: 651 - protein, 7 aa, Artificial Sequence
  Description of Artificial Sequence: Synthetic peptide
GFTFSSY

SEQ ID NO: 652 - protein, 7 aa, Artificial Sequence
  Description of Artificial Sequence: Synthetic peptide
GFTFSNY

SEQ ID NO: 653 - protein, 7 aa, Artificial Sequence
  Description of Artificial Sequence: Synthetic peptide
GFTFSSY

SEQ ID NO: 654 - protein, 7 aa, Artificial Sequence
  Description of Artificial Sequence: Synthetic peptide
GFTFSNY

SEQ ID NO: 655 - protein, 7 aa, Artificial Sequence
  Description of Artificial Sequence: Synthetic peptide
GFTFSSY

SEQ ID NO: 656 - protein, 7 aa, Artificial Sequence
  Description of Artificial Sequence: Synthetic peptide
GFTFSNY

SEQ ID NO: 657 - protein, 7 aa, Artificial Sequence
  Description of Artificial Sequence: Synthetic peptide
GFTFSNY

SEQ ID NO: 658 - protein, 7 aa, Artificial Sequence
  Description of Artificial Sequence: Synthetic peptide
GFTFSDY

SEQ ID NO: 659 - protein, 7 aa, Artificial Sequence
  Description of Artificial Sequence: Synthetic peptide
GFTFSNY

SEQ ID NO: 660 - protein, 7 aa, Artificial Sequence
  Description of Artificial Sequence: Synthetic peptide
GGTFSSY

SEQ ID NO: 661 - protein, 7 aa, Artificial Sequence
  Description of Artificial Sequence: Synthetic peptide
GFTFSNY

SEQ ID NO: 662 - protein, 7 aa, Artificial Sequence
  Description of Artificial Sequence: Synthetic peptide
GFTFSNY

SEQ ID NO: 663 - protein, 7 aa, Artificial Sequence
  Description of Artificial Sequence: Synthetic peptide
GGTFSSY

SEQ ID NO: 664 - protein, 7 aa, Artificial Sequence
  Description of Artificial Sequence: Synthetic peptide
GFTFSDY

SEQ ID NO: 665 - protein, 7 aa, Artificial Sequence
  Description of Artificial Sequence: Synthetic peptide
GFTFSSY

SEQ ID NO: 666 - protein, 7 aa, Artificial Sequence
  Description of Artificial Sequence: Synthetic peptide
GFTFSDY

SEQ ID NO: 667 - protein, 7 aa, Artificial Sequence
  Description of Artificial Sequence: Synthetic peptide
GGTFSNY

SEQ ID NO: 668 - protein, 7 aa, Artificial Sequence
  Description of Artificial Sequence: Synthetic peptide
GGTFSSY

SEQ ID NO: 669 - protein, 7 aa, Artificial Sequence
  Description of Artificial Sequence: Synthetic peptide
GFTFSSY

SEQ ID NO: 670 - protein, 7 aa, Artificial Sequence
  Description of Artificial Sequence: Synthetic peptide
GFTFSDY

SEQ ID NO: 671 - protein, 7 aa, Artificial Sequence
  Description of Artificial Sequence: Synthetic peptide
GFTFSNY

SEQ ID NO: 672 - protein, 7 aa, Artificial Sequence
  Description of Artificial Sequence: Synthetic peptide
GFTFSNY

SEQ ID NO: 673 - protein, 7 aa, Artificial Sequence
  Description of Artificial Sequence: Synthetic peptide
GGTFSNY

SEQ ID NO: 674 - protein, 7 aa, Artificial Sequence
  Description of Artificial Sequence: Synthetic peptide
GFTFSDY

SEQ ID NO: 675 - protein, 7 aa, Artificial Sequence
  Description of Artificial Sequence: Synthetic peptide
GGTFSSY

SEQ ID NO: 676 - protein, 7 aa, Artificial Sequence
  Description of Artificial Sequence: Synthetic peptide
GFTFSSY

SEQ ID NO: 677 - protein, 7 aa, Artificial Sequence
  Description of Artificial Sequence: Synthetic peptide
GFTFSSY

SEQ ID NO: 678 - protein, 7 aa, Artificial Sequence
  Description of Artificial Sequence: Synthetic peptide
GFTFSSY

SEQ ID NO: 679 - protein, 7 aa, Artificial Sequence
  Description of Artificial Sequence: Synthetic peptide
GGTFSNY

SEQ ID NO: 680 - protein, 7 aa, Artificial Sequence
  Description of Artificial Sequence: Synthetic peptide
GGTFSNY

SEQ ID NO: 681 - protein, 7 aa, Artificial Sequence
  Description of Artificial Sequence: Synthetic peptide
GGTFSSY

SEQ ID NO: 682 - protein, 7 aa, Artificial Sequence
  Description of Artificial Sequence: Synthetic peptide
GGTFSSY

SEQ ID NO: 683 - protein, 7 aa, Artificial Sequence
  Description of Artificial Sequence: Synthetic peptide
GGTFSNY

SEQ ID NO: 684 - protein, 7 aa, Artificial Sequence
  Description of Artificial Sequence: Synthetic peptide
GFTFSDY

SEQ ID NO: 685 - protein, 7 aa, Artificial Sequence
  Description of Artificial Sequence: Synthetic peptide
GGTFSNY

SEQ ID NO: 686 - protein, 7 aa, Artificial Sequence
  Description of Artificial Sequence: Synthetic peptide
GFTFSNY

SEQ ID NO: 687 - protein, 7 aa, Artificial Sequence
  Description of Artificial Sequence: Synthetic peptide
GFTFSNY

SEQ ID NO: 688 - protein, 7 aa, Artificial Sequence
  Description of Artificial Sequence: Synthetic peptide
GGTFSDY

SEQ ID NO: 689 - protein, 7 aa, Artificial Sequence
  Description of Artificial Sequence: Synthetic peptide
GGTFSDY

SEQ ID NO: 690 - protein, 7 aa, Artificial Sequence
  Description of Artificial Sequence: Synthetic peptide
GFTFSSY

SEQ ID NO: 691 - protein, 7 aa, Artificial Sequence
  Description of Artificial Sequence: Synthetic peptide
GSTISDR

SEQ ID NO: 692 - protein, 7 aa, Artificial Sequence
  Description of Artificial Sequence: Synthetic peptide
GFTFSTY

SEQ ID NO: 693 - protein, 7 aa, Artificial Sequence
  Description of Artificial Sequence: Synthetic peptide
GFSLDDY

SEQ ID NO: 694 - protein, 7 aa, Artificial Sequence
  Description of Artificial Sequence: Synthetic peptide
GRGFSRY

SEQ ID NO: 695 - protein, 7 aa, Artificial Sequence
  Description of Artificial Sequence: Synthetic peptide
GNIAAIN

SEQ ID NO: 696 - protein, 7 aa, Artificial Sequence
  Description of Artificial Sequence: Synthetic peptide
DLSFSFY

SEQ ID NO: 697 - protein, 7 aa, Artificial Sequence
  Description of Artificial Sequence: Synthetic peptide
GFTVSNY

SEQ ID NO: 698 - protein, 7 aa, Artificial Sequence
  Description of Artificial Sequence: Synthetic peptide
GFTLDYY

SEQ ID NO: 699 - protein, 7 aa, Artificial Sequence
  Description of Artificial Sequence: Synthetic peptide
GFTFSTY

SEQ ID NO: 700 - protein, 8 aa, Artificial Sequence
  Description of Artificial Sequence: Synthetic peptide
GFSFDDDY

SEQ ID NO: 701 - protein, 7 aa, Artificial Sequence
  Description of Artificial Sequence: Synthetic peptide
GGTFSIY

SEQ ID NO: 702 - protein, 7 aa, Artificial Sequence
  Description of Artificial Sequence: Synthetic peptide
GFTFSTY

SEQ ID NO: 703 - protein, 7 aa, Artificial Sequence
  Description of Artificial Sequence: Synthetic peptide
GITFRRY

SEQ ID NO: 704 - protein, 6 aa, Artificial Sequence
  Description of Artificial Sequence: Synthetic peptide
RPGNGY

SEQ ID NO: 705 - protein, 6 aa, Artificial Sequence
  Description of Artificial Sequence: Synthetic peptide
RPYDGY

SEQ ID NO: 706 - protein, 6 aa, Artificial Sequence
  Description of Artificial Sequence: Synthetic peptide
ANKYYA

SEQ ID NO: 707 - protein, 6 aa, Artificial Sequence
  Description of Artificial Sequence: Synthetic peptide
SYNGGI

SEQ ID NO: 708 - protein, 6 aa, Artificial Sequence
  Description of Artificial Sequence: Synthetic peptide
SYDGSE

SEQ ID NO: 709 - protein, 6 aa, Artificial Sequence
  Description of Artificial Sequence: Synthetic peptide
SYSGGI

SEQ ID NO: 710 - protein, 6 aa, Artificial Sequence
  Description of Artificial Sequence: Synthetic peptide
SYSGGN

SEQ ID NO: 711 - protein, 6 aa, Artificial Sequence
  Description of Artificial Sequence: Synthetic peptide
SPSGGE

SEQ ID NO: 712 - protein, 6 aa, Artificial Sequence
  Description of Artificial Sequence: Synthetic peptide
SPSGGN

SEQ ID NO: 713 - protein, 6 aa, Artificial Sequence
  Description of Artificial Sequence: Synthetic peptide
SYDGSI

SEQ ID NO: 714 - protein, 6 aa, Artificial Sequence
  Description of Artificial Sequence: Synthetic peptide
RPYDGY

SEQ ID NO: 715 - protein, 6 aa, Artificial Sequence
  Description of Artificial Sequence: Synthetic peptide
RPGDGE

SEQ ID NO: 716 - protein, 6 aa, Artificial Sequence
  Description of Artificial Sequence: Synthetic peptide
SYSGSN

SEQ ID NO: 717 - protein, 6 aa, Artificial Sequence
  Description of Artificial Sequence: Synthetic peptide
SPSGSN

SEQ ID NO: 718 - protein, 6 aa, Artificial Sequence
  Description of Artificial Sequence: Synthetic peptide
RPNNGE

SEQ ID NO: 719 - protein, 6 aa, Artificial Sequence
  Description of Artificial Sequence: Synthetic peptide
NPNNGE

SEQ ID NO: 720 - protein, 6 aa, Artificial Sequence
  Description of Artificial Sequence: Synthetic peptide
SPDGGN

SEQ ID NO: 721 - protein, 6 aa, Artificial Sequence
  Description of Artificial Sequence: Synthetic peptide
NPGDGY

SEQ ID NO: 722 - protein, 6 aa, Artificial Sequence
  Description of Artificial Sequence: Synthetic peptide
NPYNGY

SEQ ID NO: 723 - protein, 6 aa, Artificial Sequence
  Description of Artificial Sequence: Synthetic peptide
SYDGSE

SEQ ID NO: 724 - protein, 6 aa, Artificial Sequence
  Description of Artificial Sequence: Synthetic peptide
NPGDGY

SEQ ID NO: 725 - protein, 6 aa, Artificial Sequence
  Description of Artificial Sequence: Synthetic peptide
SPSGGN

SEQ ID NO: 726 - protein, 6 aa, Artificial Sequence
  Description of Artificial Sequence: Synthetic peptide
SYSGSN

SEQ ID NO: 727 - protein, 6 aa, Artificial Sequence
  Description of Artificial Sequence: Synthetic peptide
SPNGGE

SEQ ID NO: 728 - protein, 6 aa, Artificial Sequence
  Description of Artificial Sequence: Synthetic peptide
SYSGGE

SEQ ID NO: 729 - protein, 6 aa, Artificial Sequence
  Description of Artificial Sequence: Synthetic peptide
NPYNGY

SEQ ID NO: 730 - protein, 6 aa, Artificial Sequence
  Description of Artificial Sequence: Synthetic peptide
SYSGSN

SEQ ID NO: 731 - protein, 6 aa, Artificial Sequence
  Description of Artificial Sequence: Synthetic peptide
SPDGGI

SEQ ID NO: 732 - protein, 6 aa, Artificial Sequence
  Description of Artificial Sequence: Synthetic peptide
RPNNGY

SEQ ID NO: 733 - protein, 6 aa, Artificial Sequence
  Description of Artificial Sequence: Synthetic peptide
SPSGGN

SEQ ID NO: 734 - protein, 6 aa, Artificial Sequence
  Description of Artificial Sequence: Synthetic peptide
SPDGSN

SEQ ID NO: 735 - protein, 6 aa, Artificial Sequence
  Description of Artificial Sequence: Synthetic peptide
SYDGGN

SEQ ID NO: 736 - protein, 6 aa, Artificial Sequence
  Description of Artificial Sequence: Synthetic peptide
RPYDGY

SEQ ID NO: 737 - protein, 6 aa, Artificial Sequence
  Description of Artificial Sequence: Synthetic peptide
RPGNGE

SEQ ID NO: 738 - protein, 6 aa, Artificial Sequence
  Description of Artificial Sequence: Synthetic peptide
SPDGGI

SEQ ID NO: 739 - protein, 6 aa, Artificial Sequence
  Description of Artificial Sequence: Synthetic peptide
SYSGGE

SEQ ID NO: 740 - protein, 6 aa, Artificial Sequence
  Description of Artificial Sequence: Synthetic peptide
RPYNGY

SEQ ID NO: 741 - protein, 6 aa, Artificial Sequence
  Description of Artificial Sequence: Synthetic peptide
SYDGGE

SEQ ID NO: 742 - protein, 6 aa, Artificial Sequence
  Description of Artificial Sequence: Synthetic peptide
SYSGSE

SEQ ID NO: 743 - protein, 6 aa, Artificial Sequence
  Description of Artificial Sequence: Synthetic peptide
SPDGGE

SEQ ID NO: 744 - protein, 6 aa, Artificial Sequence
  Description of Artificial Sequence: Synthetic peptide
SPDGGN

SEQ ID NO: 745 - protein, 6 aa, Artificial Sequence
  Description of Artificial Sequence: Synthetic peptide
SYSGGI

SEQ ID NO: 746 - protein, 6 aa, Artificial Sequence
  Description of Artificial Sequence: Synthetic peptide
SPDGSI

SEQ ID NO: 747 - protein, 6 aa, Artificial Sequence
  Description of Artificial Sequence: Synthetic peptide
NPYNGE

SEQ ID NO: 748 - protein, 6 aa, Artificial Sequence
  Description of Artificial Sequence: Synthetic peptide
SPSGGI

SEQ ID NO: 749 - protein, 6 aa, Artificial Sequence
  Description of Artificial Sequence: Synthetic peptide
RPYDGY

SEQ ID NO: 750 - protein, 6 aa, Artificial Sequence
  Description of Artificial Sequence: Synthetic peptide
SPDGGI

SEQ ID NO: 751 - protein, 6 aa, Artificial Sequence
  Description of Artificial Sequence: Synthetic peptide
SYSGSE

SEQ ID NO: 752 - protein, 6 aa, Artificial Sequence
  Description of Artificial Sequence: Synthetic peptide
SPSGSN

SEQ ID NO: 753 - protein, 6 aa, Artificial Sequence
  Description of Artificial Sequence: Synthetic peptide
RPGNGE

SEQ ID NO: 754 - protein, 6 aa, Artificial Sequence
  Description of Artificial Sequence: Synthetic peptide
SPSGSE

SEQ ID NO: 755 - protein, 6 aa, Artificial Sequence
  Description of Artificial Sequence: Synthetic peptide
RPGDGY

SEQ ID NO: 756 - protein, 6 aa, Artificial Sequence
  Description of Artificial Sequence: Synthetic peptide
SYDGSE

SEQ ID NO: 757 - protein, 6 aa, Artificial Sequence
  Description of Artificial Sequence: Synthetic peptide
RPNNGY

SEQ ID NO: 758 - protein, 6 aa, Artificial Sequence
  Description of Artificial Sequence: Synthetic peptide
SPNGGE

SEQ ID NO: 759 - protein, 6 aa, Artificial Sequence
  Description of Artificial Sequence: Synthetic peptide
SYSGGI

SEQ ID NO: 760 - protein, 6 aa, Artificial Sequence
  Description of Artificial Sequence: Synthetic peptide
SPSGGI

SEQ ID NO: 761 - protein, 6 aa, Artificial Sequence
  Description of Artificial Sequence: Synthetic peptide
RPNNGE

SEQ ID NO: 762 - protein, 6 aa, Artificial Sequence
  Description of Artificial Sequence: Synthetic peptide
SYSGSN

SEQ ID NO: 763 - protein, 6 aa, Artificial Sequence
  Description of Artificial Sequence: Synthetic peptide
RPNDGE

SEQ ID NO: 764 - protein, 6 aa, Artificial Sequence
  Description of Artificial Sequence: Synthetic peptide
SPSGSI

SEQ ID NO: 765 - protein, 6 aa, Artificial Sequence
  Description of Artificial Sequence: Synthetic peptide
SPNGGI

SEQ ID NO: 766 - protein, 6 aa, Artificial Sequence
  Description of Artificial Sequence: Synthetic peptide
RPNNGY

SEQ ID NO: 767 - protein, 6 aa, Artificial Sequence
  Description of Artificial Sequence: Synthetic peptide
NPGDGY

SEQ ID NO: 768 - protein, 7 aa, Artificial Sequence
  Description of Artificial Sequence: Synthetic peptide
AYITYYP

SEQ ID NO: 769 - protein, 3 aa, Artificial Sequence
  Description of Artificial Sequence: Synthetic peptide
RPN

SEQ ID NO: 770 - protein, 6 aa, Artificial Sequence
  Description of Artificial Sequence: Synthetic peptide
RPGDGY

SEQ ID NO: 771 - protein, 6 aa, Artificial Sequence
  Description of Artificial Sequence: Synthetic peptide
NPGNGE

SEQ ID NO: 772 - protein, 6 aa, Artificial Sequence
  Description of Artificial Sequence: Synthetic peptide
NPNDGE

SEQ ID NO: 773 - protein, 6 aa, Artificial Sequence
  Description of Artificial Sequence: Synthetic peptide
RPGNGY

SEQ ID NO: 774 - protein, 6 aa, Artificial Sequence
  Description of Artificial Sequence: Synthetic peptide
SYDGSE

SEQ ID NO: 775 - protein, 6 aa, Artificial Sequence
  Description of Artificial Sequence: Synthetic peptide
RPNNGE

SEQ ID NO: 776 - protein, 6 aa, Artificial Sequence
  Description of Artificial Sequence: Synthetic peptide
NPYDGY

SEQ ID NO: 777 - protein, 7 aa, Artificial Sequence
  Description of Artificial Sequence: Synthetic peptide
SYDGGSI

SEQ ID NO: 778 - protein, 6 aa, Artificial Sequence
  Description of Artificial Sequence: Synthetic peptide
NPYDGY

SEQ ID NO: 779 - protein, 6 aa, Artificial Sequence
  Description of Artificial Sequence: Synthetic peptide
SPDGSN

SEQ ID NO: 780 - protein, 6 aa, Artificial Sequence
  Description of Artificial Sequence: Synthetic peptide
SPNGGI

SEQ ID NO: 781 - protein, 6 aa, Artificial Sequence
  Description of Artificial Sequence: Synthetic peptide
RPNNGY

SEQ ID NO: 782 - protein, 6 aa, Artificial Sequence
  Description of Artificial Sequence: Synthetic peptide
SYDGGE

SEQ ID NO: 783 - protein, 6 aa, Artificial Sequence
  Description of Artificial Sequence: Synthetic peptide
SYNGGN

SEQ ID NO: 784 - protein, 6 aa, Artificial Sequence
  Description of Artificial Sequence: Synthetic peptide
SYSGSE

SEQ ID NO: 785 - protein, 6 aa, Artificial Sequence
  Description of Artificial Sequence: Synthetic peptide
SYSGGN

SEQ ID NO: 786 - protein, 6 aa, Artificial Sequence
  Description of Artificial Sequence: Synthetic peptide
SYDGSN

SEQ ID NO: 787 - protein, 6 aa, Artificial Sequence
  Description of Artificial Sequence: Synthetic peptide
SYDGGI

SEQ ID NO: 788 - skipped

SEQ ID NO: 789 - protein, 6 aa, Artificial Sequence
  Description of Artificial Sequence: Synthetic peptide
SPSGGE

SEQ ID NO: 790 - protein, 6 aa, Artificial Sequence
  Description of Artificial Sequence: Synthetic peptide
SYNGGN

SEQ ID NO: 791 - protein, 6 aa, Artificial Sequence
  Description of Artificial Sequence: Synthetic peptide
SYSGGN

SEQ ID NO: 792 - protein, 6 aa, Artificial Sequence
  Description of Artificial Sequence: Synthetic peptide
SPNGGN

SEQ ID NO: 793 - protein, 6 aa, Artificial Sequence
  Description of Artificial Sequence: Synthetic peptide
SYSGGI

SEQ ID NO: 794 - protein, 6 aa, Artificial Sequence
  Description of Artificial Sequence: Synthetic peptide
SYDGSN

SEQ ID NO: 795 - protein, 6 aa, Artificial Sequence
  Description of Artificial Sequence: Synthetic peptide
SYNGGN

SEQ ID NO: 796 - protein, 6 aa, Artificial Sequence
  Description of Artificial Sequence: Synthetic peptide
SPNGGI

SEQ ID NO: 797 - protein, 6 aa, Artificial Sequence
  Description of Artificial Sequence: Synthetic peptide
RPGNGE

SEQ ID NO: 798 - protein, 6 aa, Artificial Sequence
  Description of Artificial Sequence: Synthetic peptide
SPSGGI

SEQ ID NO: 799 - protein, 6 aa, Artificial Sequence
  Description of Artificial Sequence: Synthetic peptide
SYNGGI

SEQ ID NO: 800 - protein, 6 aa, Artificial Sequence
  Description of Artificial Sequence: Synthetic peptide
NPNDGY

SEQ ID NO: 801 - protein, 6 aa, Artificial Sequence
  Description of Artificial Sequence: Synthetic peptide
SYDGSN

SEQ ID NO: 802 - protein, 6 aa, Artificial Sequence
  Description of Artificial Sequence: Synthetic peptide
SPSGSE

SEQ ID NO: 803 - protein, 6 aa, Artificial Sequence
  Description of Artificial Sequence: Synthetic peptide
SPSGSE

SEQ ID NO: 804 - protein, 6 aa, Artificial Sequence
  Description of Artificial Sequence: Synthetic peptide
RPNDGE

SEQ ID NO: 805 - protein, 6 aa, Artificial Sequence
  Description of Artificial Sequence: Synthetic peptide
RPNNGY

SEQ ID NO: 806 - protein, 6 aa, Artificial Sequence
  Description of Artificial Sequence: Synthetic peptide
SPDGGE

SEQ ID NO: 807 - protein, 6 aa, Artificial Sequence
  Description of Artificial Sequence: Synthetic peptide
SYDGGI

SEQ ID NO: 808 - protein, 6 aa, Artificial Sequence
  Description of Artificial Sequence: Synthetic peptide
SYDGGN

SEQ ID NO: 809 - protein, 6 aa, Artificial Sequence
  Description of Artificial Sequence: Synthetic peptide
SYDGSN

SEQ ID NO: 810 - protein, 6 aa, Artificial Sequence
  Description of Artificial Sequence: Synthetic peptide
RPGNGY

SEQ ID NO: 811 - protein, 6 aa, Artificial Sequence
  Description of Artificial Sequence: Synthetic peptide
SYSGSN

SEQ ID NO: 812 - protein, 6 aa, Artificial Sequence
  Description of Artificial Sequence: Synthetic peptide
RPNDGE

SEQ ID NO: 813 - protein, 6 aa, Artificial Sequence
  Description of Artificial Sequence: Synthetic peptide
SYSGSN

SEQ ID NO: 814 - protein, 6 aa, Artificial Sequence
  Description of Artificial Sequence: Synthetic peptide
SPDGGI

SEQ ID NO: 815 - protein, 6 aa, Artificial Sequence
  Description of Artificial Sequence: Synthetic peptide
SYDGGN

SEQ ID NO: 816 - protein, 6 aa, Artificial Sequence
  Description of Artificial Sequence: Synthetic peptide
RPNNGE

SEQ ID NO: 817 - protein, 6 aa, Artificial Sequence
  Description of Artificial Sequence: Synthetic peptide
RLNNGY

SEQ ID NO: 818 - protein, 6 aa, Artificial Sequence
  Description of Artificial Sequence: Synthetic peptide
RPNDGY

SEQ ID NO: 819 - protein, 6 aa, Artificial Sequence
  Description of Artificial Sequence: Synthetic peptide
NPNDGY

SEQ ID NO: 820 - protein, 6 aa, Artificial Sequence
  Description of Artificial Sequence: Synthetic peptide
RPNNGE

SEQ ID NO: 821 - protein, 6 aa, Artificial Sequence
  Description of Artificial Sequence: Synthetic peptide
SPSGSE

SEQ ID NO: 822 - protein, 6 aa, Artificial Sequence
  Description of Artificial Sequence: Synthetic peptide
NPGDGY

SEQ ID NO: 823 - protein, 6 aa, Artificial Sequence
  Description of Artificial Sequence: Synthetic peptide
SPNGGN

SEQ ID NO: 824 - protein, 6 aa, Artificial Sequence
  Description of Artificial Sequence: Synthetic peptide
SYSGGN

SEQ ID NO: 825 - protein, 6 aa, Artificial Sequence
  Description of Artificial Sequence: Synthetic peptide
RPGDGE

SEQ ID NO: 826 - protein, 6 aa, Artificial Sequence
  Description of Artificial Sequence: Synthetic peptide
NPGDGY

SEQ ID NO: 827 - protein, 6 aa, Artificial Sequence
  Description of Artificial Sequence: Synthetic peptide
SYNGGE

SEQ ID NO: 828 - protein, 4 aa, Artificial Sequence
  Description of Artificial Sequence: Synthetic peptide
IGDA

SEQ ID NO: 829 - protein, 6 aa, Artificial Sequence
  Description of Artificial Sequence: Synthetic peptide
SGSGSI

SEQ ID NO: 830 - protein, 5 aa, Artificial Sequence
  Description of Artificial Sequence: Synthetic peptide
GSDGS

SEQ ID NO: 831 - protein, 10 aa, Artificial Sequence
  Description of Artificial Sequence: Synthetic peptide
TPINWGGRGT

SEQ ID NO: 832 - protein, 6 aa, Artificial Sequence
  Description of Artificial Sequence: Synthetic peptide
SWSSGS

SEQ ID NO: 833 - protein, 5 aa, Artificial Sequence
  Description of Artificial Sequence: Synthetic peptide
NWSGT

SEQ ID NO: 834 - protein, 6 aa, Artificial Sequence
  Description of Artificial Sequence: Synthetic peptide
RWSGGI

SEQ ID NO: 835 - protein, 6 aa, Artificial Sequence
  Description of Artificial Sequence: Synthetic peptide
NWSGDT

SEQ ID NO: 836 - protein, 6 aa, Artificial Sequence
  Description of Artificial Sequence: Synthetic peptide
SGSGSI

SEQ ID NO: 837 - protein, 6 aa, Artificial Sequence
  Description of Artificial Sequence: Synthetic peptide
DWNGNS

SEQ ID NO: 838 - protein, 5 aa, Artificial Sequence
  Description of Artificial Sequence: Synthetic peptide
STHSI

SEQ ID NO: 839 - protein, 6 aa, Artificial Sequence
  Description of Artificial Sequence: Synthetic peptide
SGSGSI

SEQ ID NO: 840 - protein, 6 aa, Artificial Sequence
  Description of Artificial Sequence: Synthetic peptide
SSSGAL

SEQ ID NO: 841 - protein, 6 aa, Artificial Sequence
  Description of Artificial Sequence: Synthetic peptide
SRSGET

SEQ ID NO: 842 - protein, 6 aa, Artificial Sequence
  Description of Artificial Sequence: Synthetic peptide
SWTGGS

SEQ ID NO: 843 - protein, 4 aa, Artificial Sequence
  Description of Artificial Sequence: Synthetic peptide
IGDA

SEQ ID NO: 844 - protein, 6 aa, Artificial Sequence
  Description of Artificial Sequence: Synthetic peptide
SWSGGL

SEQ ID NO: 845 - protein, 4 aa, Artificial Sequence
  Description of Artificial Sequence: Synthetic peptide
IGDA

SEQ ID NO: 846 - protein, 6 aa, Artificial Sequence
  Description of Artificial Sequence: Synthetic peptide
SWTGGS

SEQ ID NO: 847 - protein, 6 aa, Artificial Sequence
  Description of Artificial Sequence: Synthetic peptide
NWNGDS

SEQ ID NO: 848 - protein, 6 aa, Artificial Sequence
  Description of Artificial Sequence: Synthetic peptide
RWSGGS

SEQ ID NO: 849 - protein, 5 aa, Artificial Sequence
  Description of Artificial Sequence: Synthetic peptide
HSSGS

SEQ ID NO: 850 - protein, 5 aa, Artificial Sequence
  Description of Artificial Sequence: Synthetic peptide
SSGGN

SEQ ID NO: 851 - protein, 6 aa, Artificial Sequence
  Description of Artificial Sequence: Synthetic peptide
AWGDGI

SEQ ID NO: 852 - protein, 6 aa, Artificial Sequence
  Description of Artificial Sequence: Synthetic peptide
TRSGKT

SEQ ID NO: 853 - protein, 6 aa, Artificial Sequence
  Description of Artificial Sequence: Synthetic peptide
SWSAGS

SEQ ID NO: 854 - protein, 6 aa, Artificial Sequence
  Description of Artificial Sequence: Synthetic peptide
TWSGGL

SEQ ID NO: 855 - protein, 6 aa, Artificial Sequence
  Description of Artificial Sequence: Synthetic peptide
SWSGDS

SEQ ID NO: 856 - protein, 6 aa, Artificial Sequence
  Description of Artificial Sequence: Synthetic peptide
NRSGDT

SEQ ID NO: 857 - protein, 6 aa, Artificial Sequence
  Description of Artificial Sequence: Synthetic peptide
STDVDS

SEQ ID NO: 858 - protein, 6 aa, Artificial Sequence
  Description of Artificial Sequence: Synthetic peptide
TSSDGR

SEQ ID NO: 859 - protein, 6 aa, Artificial Sequence
  Description of Artificial Sequence: Synthetic peptide
NRSGDT

SEQ ID NO: 860 - protein, 6 aa, Artificial Sequence
  Description of Artificial Sequence: Synthetic peptide
RWSGAS

SEQ ID NO: 861 - protein, 6 aa, Artificial Sequence
  Description of Artificial Sequence: Synthetic peptide
AWGDGI

SEQ ID NO: 862 - protein, 6 aa, Artificial Sequence
  Description of Artificial Sequence: Synthetic peptide
RWSGGI

SEQ ID NO: 863 - protein, 6 aa, Artificial Sequence
  Description of Artificial Sequence: Synthetic peptide
AWGDGS

SEQ ID NO: 864 - protein, 5 aa, Artificial Sequence
  Description of Artificial Sequence: Synthetic peptide
SSEGT

SEQ ID NO: 865 - protein, 6 aa, Artificial Sequence
  Description of Artificial Sequence: Synthetic peptide
SRSGGS

SEQ ID NO: 866 - protein, 6 aa, Artificial Sequence
  Description of Artificial Sequence: Synthetic peptide
SRSGGD

SEQ ID NO: 867 - protein, 6 aa, Artificial Sequence
  Description of Artificial Sequence: Synthetic peptide
DWNGNS

SEQ ID NO: 868 - protein, 6 aa, Artificial Sequence
  Description of Artificial Sequence: Synthetic peptide
DWNGNS

SEQ ID NO: 869 - protein, 5 aa, Artificial Sequence
  Description of Artificial Sequence: Synthetic peptide
TPGGN

SEQ ID NO: 870 - protein, 5 aa, Artificial Sequence
  Description of Artificial Sequence: Synthetic peptide
SFGGN

SEQ ID NO: 871 - protein, 5 aa, Artificial Sequence
  Description of Artificial Sequence: Synthetic peptide
GSDGS

SEQ ID NO: 872 - protein, 5 aa, Artificial Sequence
  Description of Artificial Sequence: Synthetic peptide
GSDGS

SEQ ID NO: 873 - protein, 6 aa, Artificial Sequence
  Description of Artificial Sequence: Synthetic peptide
SRSGNV

SEQ ID NO: 874 - protein, 6 aa, Artificial Sequence
  Description of Artificial Sequence: Synthetic peptide
AWSSDF

SEQ ID NO: 875 - protein, 6 aa, Artificial Sequence
  Description of Artificial Sequence: Synthetic peptide
SWIIGS

SEQ ID NO: 876 - protein, 6 aa, Artificial Sequence
  Description of Artificial Sequence: Synthetic peptide
SWIIGS

SEQ ID NO: 877 - protein, 4 aa, Artificial Sequence
  Description of Artificial Sequence: Synthetic peptide
TRGS

SEQ ID NO: 878 - protein, 5 aa, Artificial Sequence
  Description of Artificial Sequence: Synthetic peptide
TADGI

SEQ ID NO: 879 - protein, 6 aa, Artificial Sequence
  Description of Artificial Sequence: Synthetic peptide
RWSGGI

SEQ ID NO: 880 - protein, 6 aa, Artificial Sequence
  Description of Artificial Sequence: Synthetic peptide
SWSGGS

SEQ ID NO: 881 - protein, 6 aa, Artificial Sequence
  Description of Artificial Sequence: Synthetic peptide
NWNGAS

SEQ ID NO: 882 - protein, 4 aa, Artificial Sequence
  Description of Artificial Sequence: Synthetic peptide
YPSG

SEQ ID NO: 883 - protein, 5 aa, Artificial Sequence
  Description of Artificial Sequence: Synthetic peptide
TSGGI

SEQ ID NO: 884 - protein, 10 aa, Artificial Sequence
  Description of Artificial Sequence: Synthetic peptide
TPINWGGRGT

SEQ ID NO: 885 - protein, 6 aa, Artificial Sequence
  Description of Artificial Sequence: Synthetic peptide
SSSGIS

SEQ ID NO: 886 - protein, 6 aa, Artificial Sequence
  Description of Artificial Sequence: Synthetic peptide
NYSGGS

SEQ ID NO: 887 - protein, 11 aa, Artificial Sequence
  Description of Artificial Sequence: Synthetic peptide
SRGGMTSLGDS

SEQ ID NO: 888 - protein, 6 aa, Artificial Sequence
  Description of Artificial Sequence: Synthetic peptide
SWSGGS

SEQ ID NO: 889 - protein, 5 aa, Artificial Sequence
  Description of Artificial Sequence: Synthetic peptide
GSDGS

SEQ ID NO: 890 - protein, 6 aa, Artificial Sequence
  Description of Artificial Sequence: Synthetic peptide
RWSGGI

SEQ ID NO: 891 - protein, 10 aa, Artificial Sequence
  Description of Artificial Sequence: Synthetic peptide
TPINWGGRGT

SEQ ID NO: 892 - protein, 6 aa, Artificial Sequence
  Description of Artificial Sequence: Synthetic peptide
RWSGGI

SEQ ID NO: 893 - protein, 6 aa, Artificial Sequence
  Description of Artificial Sequence: Synthetic peptide
SRSGGT

SEQ ID NO: 894 - protein, 6 aa, Artificial Sequence
  Description of Artificial Sequence: Synthetic peptide
RWSEDR

SEQ ID NO: 895 - protein, 6 aa, Artificial Sequence
  Description of Artificial Sequence: Synthetic peptide
RWSEDR

SEQ ID NO: 896 - protein, 6 aa, Artificial Sequence
  Description of Artificial Sequence: Synthetic peptide
DWSGSS

SEQ ID NO: 897 - protein, 6 aa, Artificial Sequence
  Description of Artificial Sequence: Synthetic peptide
SRSGDT

SEQ ID NO: 898 - protein, 6 aa, Artificial Sequence
  Description of Artificial Sequence: Synthetic peptide
SRSGDT

SEQ ID NO: 899 - protein, 6 aa, Artificial Sequence
  Description of Artificial Sequence: Synthetic peptide
SRSGSI

SEQ ID NO: 900 - protein, 6 aa, Artificial Sequence
  Description of Artificial Sequence: Synthetic peptide
SWSEDN

SEQ ID NO: 901 - protein, 5 aa, Artificial Sequence
  Description of Artificial Sequence: Synthetic peptide
TNGGS

SEQ ID NO: 902 - protein, 6 aa, Artificial Sequence
  Description of Artificial Sequence: Synthetic peptide
TWSGGI

SEQ ID NO: 903 - protein, 6 aa, Artificial Sequence
  Description of Artificial Sequence: Synthetic peptide
SNSGLS

SEQ ID NO: 904 - protein, 6 aa, Artificial Sequence
  Description of Artificial Sequence: Synthetic peptide
SRSGGT

SEQ ID NO: 905 - protein, 6 aa, Artificial Sequence
  Description of Artificial Sequence: Synthetic peptide
SSSGEV

SEQ ID NO: 906 - protein, 5 aa, Artificial Sequence
  Description of Artificial Sequence: Synthetic peptide
TSGGT

SEQ ID NO: 907 - protein, 6 aa, Artificial Sequence
  Description of Artificial Sequence: Synthetic peptide
DWSGGT

SEQ ID NO: 908 - protein, 6 aa, Artificial Sequence
  Description of Artificial Sequence: Synthetic peptide
SGSGSI

SEQ ID NO: 909 - protein, 5 aa, Artificial Sequence
  Description of Artificial Sequence: Synthetic peptide
DTSGI

SEQ ID NO: 910 - protein, 6 aa, Artificial Sequence
  Description of Artificial Sequence: Synthetic peptide
SSSGVT

SEQ ID NO: 911 - protein, 6 aa, Artificial Sequence
  Description of Artificial Sequence: Synthetic peptide
SMSGDD

SEQ ID NO: 912 - protein, 6 aa, Artificial Sequence
  Description of Artificial Sequence: Synthetic peptide
NWDSAR

SEQ ID NO: 913 - protein, 6 aa, Artificial Sequence
  Description of Artificial Sequence: Synthetic peptide
SGGGSI

SEQ ID NO: 914 - protein, 5 aa, Artificial Sequence
  Description of Artificial Sequence: Synthetic peptide
SGSGA

SEQ ID NO: 915 - protein, 6 aa, Artificial Sequence
  Description of Artificial Sequence: Synthetic peptide
SGSGSI

SEQ ID NO: 916 - protein, 6 aa, Artificial Sequence
  Description of Artificial Sequence: Synthetic peptide
SGSGSI

SEQ ID NO: 917 - protein, 6 aa, Artificial Sequence
  Description of Artificial Sequence: Synthetic peptide
SGSGSI

SEQ ID NO: 918 - protein, 6 aa, Artificial Sequence
  Description of Artificial Sequence: Synthetic peptide
SGSGSI

SEQ ID NO: 919 - protein, 6 aa, Artificial Sequence
  Description of Artificial Sequence: Synthetic peptide
SGSGSI

SEQ ID NO: 920 - protein, 6 aa, Artificial Sequence
  Description of Artificial Sequence: Synthetic peptide
SRSGSI

SEQ ID NO: 921 - protein, 6 aa, Artificial Sequence
  Description of Artificial Sequence: Synthetic peptide
SGSGSI

SEQ ID NO: 922 - protein, 6 aa, Artificial Sequence
  Description of Artificial Sequence: Synthetic peptide
SGSGSI

SEQ ID NO: 923 - protein, 6 aa, Artificial Sequence
  Description of Artificial Sequence: Synthetic peptide
SGSGSI

SEQ ID NO: 924 - protein, 6 aa, Artificial Sequence
  Description of Artificial Sequence: Synthetic peptide
SGSGSI

SEQ ID NO: 925 - protein, 6 aa, Artificial Sequence
  Description of Artificial Sequence: Synthetic peptide
SGSGSI

SEQ ID NO: 926 - protein, 6 aa, Artificial Sequence
  Description of Artificial Sequence: Synthetic peptide
SGSGSI

SEQ ID NO: 927 - protein, 6 aa, Artificial Sequence
  Description of Artificial Sequence: Synthetic peptide
SGSGSI

SEQ ID NO: 928 - protein, 6 aa, Artificial Sequence
  Description of Artificial Sequence: Synthetic peptide
SGSGSI

SEQ ID NO: 929 - protein, 6 aa, Artificial Sequence
  Description of Artificial Sequence: Synthetic peptide
SSSGGS

SEQ ID NO: 930 - protein, 6 aa, Artificial Sequence
  Description of Artificial Sequence: Synthetic peptide
SSSGGS

SEQ ID NO: 931 - protein, 5 aa, Artificial Sequence
  Description of Artificial Sequence: Synthetic peptide
YSDGS

SEQ ID NO: 932 - protein, 6 aa, Artificial Sequence
  Description of Artificial Sequence: Synthetic peptide
NWNGDS

SEQ ID NO: 933 - protein, 5 aa, Artificial Sequence
  Description of Artificial Sequence: Synthetic peptide
NSDGT

SEQ ID NO: 934 - protein, 5 aa, Artificial Sequence
  Description of Artificial Sequence: Synthetic peptide
NSGGS

SEQ ID NO: 935 - protein, 5 aa, Artificial Sequence
  Description of Artificial Sequence: Synthetic peptide
NSGGS

SEQ ID NO: 936 - protein, 6 aa, Artificial Sequence
  Description of Artificial Sequence: Synthetic peptide
SKSDGS

SEQ ID NO: 937 - protein, 5 aa, Artificial Sequence
  Description of Artificial Sequence: Synthetic peptide
SRSGN

SEQ ID NO: 938 - protein, 6 aa, Artificial Sequence
  Description of Artificial Sequence: Synthetic peptide
SSSGVT

SEQ ID NO: 939 - protein, 6 aa, Artificial Sequence
  Description of Artificial Sequence: Synthetic peptide
SSSGVT

SEQ ID NO: 940 - protein, 6 aa, Artificial Sequence
  Description of Artificial Sequence: Synthetic peptide
SWSGSN

SEQ ID NO: 941 - protein, 6 aa, Artificial Sequence
  Description of Artificial Sequence: Synthetic peptide
SWSGGI

SEQ ID NO: 942 - protein, 5 aa, Artificial Sequence
  Description of Artificial Sequence: Synthetic peptide
GSDGS

SEQ ID NO: 943 - protein, 6 aa, Artificial Sequence
  Description of Artificial Sequence: Synthetic peptide
SSSDGS

SEQ ID NO: 944 - protein, 6 aa, Artificial Sequence
  Description of Artificial Sequence: Synthetic peptide
RWSDGT

SEQ ID NO: 945 - protein, 6 aa, Artificial Sequence
  Description of Artificial Sequence: Synthetic peptide
RWSDGT

SEQ ID NO: 946 - protein, 6 aa, Artificial Sequence
  Description of Artificial Sequence: Synthetic peptide
SRSPGV

SEQ ID NO: 947 - protein, 6 aa, Artificial Sequence
  Description of Artificial Sequence: Synthetic peptide
STGGDT

SEQ ID NO: 948 - protein, 6 aa, Artificial Sequence
  Description of Artificial Sequence: Synthetic peptide
SSSDKD

SEQ ID NO: 949 - protein, 6 aa, Artificial Sequence
  Description of Artificial Sequence: Synthetic peptide
SWDGRN

SEQ ID NO: 950 - protein, 5 aa, Artificial Sequence
  Description of Artificial Sequence: Synthetic peptide
GSDGT

SEQ ID NO: 951 - protein, 6 aa, Artificial Sequence
  Description of Artificial Sequence: Synthetic peptide
NWSLTR

SEQ ID NO: 952 - protein, 6 aa, Artificial Sequence
  Description of Artificial Sequence: Synthetic peptide
SWNGGS

SEQ ID NO: 953 - protein, 6 aa, Artificial Sequence
  Description of Artificial Sequence: Synthetic peptide
SGSGSI

SEQ ID NO: 954 - protein, 6 aa, Artificial Sequence
  Description of Artificial Sequence: Synthetic peptide
SSSGIS

SEQ ID NO: 955 - protein, 5 aa, Artificial Sequence
  Description of Artificial Sequence: Synthetic peptide
SSGGT

SEQ ID NO: 956 - protein, 6 aa, Artificial Sequence
  Description of Artificial Sequence: Synthetic peptide
NRSGDT

SEQ ID NO: 957 - protein, 6 aa, Artificial Sequence
  Description of Artificial Sequence: Synthetic peptide
RWSGGI

SEQ ID NO: 958 - protein, 6 aa, Artificial Sequence
  Description of Artificial Sequence: Synthetic peptide
RWSGGI

SEQ ID NO: 959 - protein, 6 aa, Artificial Sequence
  Description of Artificial Sequence: Synthetic peptide
SGSDGS

SEQ ID NO: 960 - protein, 6 aa, Artificial Sequence
  Description of Artificial Sequence: Synthetic peptide
ASMGGL

SEQ ID NO: 961 - protein, 6 aa, Artificial Sequence
  Description of Artificial Sequence: Synthetic peptide
ASMGGL

SEQ ID NO: 962 - protein, 6 aa, Artificial Sequence
  Description of Artificial Sequence: Synthetic peptide
AWSSDF

SEQ ID NO: 963 - protein, 7 aa, Artificial Sequence
  Description of Artificial Sequence: Synthetic peptide
RWSGGQI

SEQ ID NO: 964 - protein, 5 aa, Artificial Sequence
  Description of Artificial Sequence: Synthetic peptide
TSGGS

SEQ ID NO: 965 - protein, 6 aa, Artificial Sequence
  Description of Artificial Sequence: Synthetic peptide
NYSGGS

SEQ ID NO: 966 - protein, 6 aa, Artificial Sequence
  Description of Artificial Sequence: Synthetic peptide
SGTGTI

SEQ ID NO: 967 - protein, 6 aa, Artificial Sequence
  Description of Artificial Sequence: Synthetic peptide
NWSGKD

SEQ ID NO: 968 - protein, 6 aa, Artificial Sequence
  Description of Artificial Sequence: Synthetic peptide
YWSGKD

SEQ ID NO: 969 - protein, 6 aa, Artificial Sequence
  Description of Artificial Sequence: Synthetic peptide
NRSGGA

SEQ ID NO: 970 - protein, 6 aa, Artificial Sequence
  Description of Artificial Sequence: Synthetic peptide
SWSAGS

SEQ ID NO: 971 - protein, 5 aa, Artificial Sequence
  Description of Artificial Sequence: Synthetic peptide
SSGGN

SEQ ID NO: 972 - protein, 6 aa, Artificial Sequence
  Description of Artificial Sequence: Synthetic peptide
SWSGDN

SEQ ID NO: 973 - protein, 6 aa, Artificial Sequence
  Description of Artificial Sequence: Synthetic peptide
SWSDGS

SEQ ID NO: 974 - protein, 5 aa, Artificial Sequence
  Description of Artificial Sequence: Synthetic peptide
SSEGT

SEQ ID NO: 975 - protein, 6 aa, Artificial Sequence
  Description of Artificial Sequence: Synthetic peptide
TWSGDS

SEQ ID NO: 976 - protein, 6 aa, Artificial Sequence
  Description of Artificial Sequence: Synthetic peptide
SWTGGS

SEQ ID NO: 977 - protein, 6 aa, Artificial Sequence
  Description of Artificial Sequence: Synthetic peptide
SWTGGS

SEQ ID NO: 978 - protein, 18 aa, Artificial Sequence
  Description of Artificial Sequence: Synthetic peptide
KDVWVIFSTHDGAYGFDV

SEQ ID NO: 979 - protein, 14 aa, Artificial Sequence
  Description of Artificial Sequence: Synthetic peptide
ASPGGAINYGRGYD

SEQ ID NO: 980 - protein, 10 aa, Artificial Sequence
  Description of Artificial Sequence: Synthetic peptide
HDHDYYAFDY

SEQ ID NO: 981 - protein, 14 aa, Artificial Sequence
  Description of Artificial Sequence: Synthetic peptide
HTSSNGVYSTWFAY

SEQ ID NO: 982 - protein, 7 aa, Artificial Sequence
  Description of Artificial Sequence: Synthetic peptide
NESDAYN

SEQ ID NO: 983 - protein, 10 aa, Artificial Sequence
  Description of Artificial Sequence: Synthetic peptide
DDDGGDAFDY

SEQ ID NO: 984 - protein, 14 aa, Artificial Sequence
  Description of Artificial Sequence: Synthetic peptide
ASPGGAINYGRGYD

SEQ ID NO: 985 - protein, 13 aa, Artificial Sequence
  Description of Artificial Sequence: Synthetic peptide
DYSSSFVFHAMDY

SEQ ID NO: 986 - protein, 10 aa, Artificial Sequence
  Description of Artificial Sequence: Synthetic peptide
IRTNYFGFDY

SEQ ID NO: 987 - protein, 14 aa, Artificial Sequence
  Description of Artificial Sequence: Synthetic peptide
ASPGGAINYGRGYD

SEQ ID NO: 988 - protein, 14 aa, Artificial Sequence
  Description of Artificial Sequence: Synthetic peptide
ASPGGAINYGRGYD

SEQ ID NO: 989 - protein, 10 aa, Artificial Sequence
  Description of Artificial Sequence: Synthetic peptide
HLTNYDPFDY

SEQ ID NO: 990 - protein, 10 aa, Artificial Sequence
  Description of Artificial Sequence: Synthetic peptide
GDTNWFAFDY

SEQ ID NO: 991 - protein, 10 aa, Artificial Sequence
  Description of Artificial Sequence: Synthetic peptide
ILTGGYPFDY

SEQ ID NO: 992 - protein, 7 aa, Artificial Sequence
  Description of Artificial Sequence: Synthetic peptide
NESDAYN

SEQ ID NO: 993 - protein, 10 aa, Artificial Sequence
  Description of Artificial Sequence: Synthetic peptide
HRHYGYPFDY

SEQ ID NO: 994 - protein, 10 aa, Artificial Sequence
  Description of Artificial Sequence: Synthetic peptide
HRHYNYAFDY

SEQ ID NO: 995 - protein, 10 aa, Artificial Sequence
  Description of Artificial Sequence: Synthetic peptide
FGHSGRSFAY

SEQ ID NO: 996 - protein, 15 aa, Artificial Sequence
  Description of Artificial Sequence: Synthetic peptide
GKDDRLDYLGYYFDY

SEQ ID NO: 997 - protein, 10 aa, Artificial Sequence
  Description of Artificial Sequence: Synthetic peptide
HLDGGDGFDY

SEQ ID NO: 998 - protein, 10 aa, Artificial Sequence
  Description of Artificial Sequence: Synthetic peptide
DDRGYFGFDY

SEQ ID NO: 999 - protein, 18 aa, Artificial Sequence
  Description of Artificial Sequence: Synthetic peptide
PSYLDSVYGHDGYYTLDV

SEQ ID NO: 1000 - protein, 13 aa, Artificial Sequence
  Description of Artificial Sequence: Synthetic peptide
SLLPNTVTAYMDY

SEQ ID NO: 1001 - protein, 10 aa, Artificial Sequence
  Description of Artificial Sequence: Synthetic peptide
DDDGWYPFDY

SEQ ID NO: 1002 - protein, 13 aa, Artificial Sequence
  Description of Artificial Sequence: Synthetic peptide
HGYKSNYLSYMDY

SEQ ID NO: 1003 - protein, 10 aa, Artificial Sequence
  Description of Artificial Sequence: Synthetic peptide
DDHGWYPFDY

SEQ ID NO: 1004 - protein, 10 aa, Artificial Sequence
  Description of Artificial Sequence: Synthetic peptide
GRHNNFGFDY

SEQ ID NO: 1005 - protein, 10 aa, Artificial Sequence
  Description of Artificial Sequence: Synthetic peptide
ILDYYFPFDY

SEQ ID NO: 1006 - protein, 14 aa, Artificial Sequence
  Description of Artificial Sequence: Synthetic peptide
SESSFYVYQTAFAY

SEQ ID NO: 1007 - protein, 13 aa, Artificial Sequence
  Description of Artificial Sequence: Synthetic peptide
SGLWYNVFNAMDY

SEQ ID NO: 1008 - protein, 18 aa, Artificial Sequence
  Description of Artificial Sequence: Synthetic peptide
KSHYFGFWGNNGARTFDY

SEQ ID NO: 1009 - protein, 21 aa, Artificial Sequence
  Description of Artificial Sequence: Synthetic peptide
GELNRGDRYGYRYHKHRGMDV

SEQ ID NO: 1010 - protein, 13 aa, Artificial Sequence
  Description of Artificial Sequence: Synthetic peptide
DLYWNFGGYAMDY

SEQ ID NO: 1011 - protein, 12 aa, Artificial Sequence
  Description of Artificial Sequence: Synthetic peptide
SFFYYHYGAFDY

SEQ ID NO: 1012 - protein, 18 aa, Artificial Sequence
  Description of Artificial Sequence: Synthetic peptide
IDGYYIRWTYYHARTFDY

SEQ ID NO: 1013 - protein, 18 aa, Artificial Sequence
  Description of Artificial Sequence: Synthetic peptide
PSRPSHYSAFSHPYYMDY

SEQ ID NO: 1014 - protein, 15 aa, Artificial Sequence
  Description of Artificial Sequence: Synthetic peptide
GPQSWYGLWGQNFDY

SEQ ID NO: 1015 - protein, 10 aa, Artificial Sequence
  Description of Artificial Sequence: Synthetic peptide
HLDNGFPFDY

SEQ ID NO: 1016 - protein, 18 aa, Artificial Sequence
  Description of Artificial Sequence: Synthetic peptide
IRHRFILWRNYGARGMDY

SEQ ID NO: 1017 - protein, 15 aa, Artificial Sequence
  Description of Artificial Sequence: Synthetic peptide
DRDRYLDLHRYPFDY

SEQ ID NO: 1018 - protein, 13 aa, Artificial Sequence
  Description of Artificial Sequence: Synthetic peptide
LLSKSNNLHAMDY

SEQ ID NO: 1019 - protein, 18 aa, Artificial Sequence
  Description of Artificial Sequence: Synthetic peptide
GGAYYYTSITSHGFQFDY

SEQ ID NO: 1020 - protein, 14 aa, Artificial Sequence
  Description of Artificial Sequence: Synthetic peptide
STIGYDYGYYGFDY

SEQ ID NO: 1021 - protein, 18 aa, Artificial Sequence
  Description of Artificial Sequence: Synthetic peptide
RVYWDGFYTQDYYYTLDV

SEQ ID NO: 1022 - protein, 15 aa, Artificial Sequence
  Description of Artificial Sequence: Synthetic peptide
DTSSWTPLLTFYFDY

SEQ ID NO: 1023 - protein, 10 aa, Artificial Sequence
  Description of Artificial Sequence: Synthetic peptide
HLHDNDAFDY

SEQ ID NO: 1024 - protein, 10 aa, Artificial Sequence
  Description of Artificial Sequence: Synthetic peptide
HRTDGYPFDY

SEQ ID NO: 1025 - protein, 18 aa, Artificial Sequence
  Description of Artificial Sequence: Synthetic peptide
KDGLYDRSGYRHARTFDY

SEQ ID NO: 1026 - protein, 21 aa, Artificial Sequence
  Description of Artificial Sequence: Synthetic peptide
DEDYYYDGSRFNGGYYGPMDV

SEQ ID NO: 1027 - protein, 18 aa, Artificial Sequence
  Description of Artificial Sequence: Synthetic peptide
RDYWYSVYTHRYARTFDV

SEQ ID NO: 1028 - protein, 10 aa, Artificial Sequence
  Description of Artificial Sequence: Synthetic peptide
DRHGNYAFDY

SEQ ID NO: 1029 - protein, 10 aa, Artificial Sequence
  Description of Artificial Sequence: Synthetic peptide
RGYSRDWFAY

SEQ ID NO: 1030 - protein, 14 aa, Artificial Sequence
  Description of Artificial Sequence: Synthetic peptide
LFFSSDDFAFAFDY

SEQ ID NO: 1031 - protein, 10 aa, Artificial Sequence
  Description of Artificial Sequence: Synthetic peptide
DLTGYYPFDY

SEQ ID NO: 1032 - protein, 15 aa, Artificial Sequence
  Description of Artificial Sequence: Synthetic peptide
DDDGYLDYLRFNFDY

SEQ ID NO: 1033 - protein, 13 aa, Artificial Sequence
  Description of Artificial Sequence: Synthetic peptide
LYGPNTVTYYMDY

SEQ ID NO: 1034 - protein, 18 aa, Artificial Sequence
  Description of Artificial Sequence: Synthetic peptide
GSAYYHYYYYSHGGAFAY

SEQ ID NO: 1035 - protein, 18 aa, Artificial Sequence
  Description of Artificial Sequence: Synthetic peptide
RVHWYGRYTHNYYYGLDV

SEQ ID NO: 1036 - protein, 14 aa, Artificial Sequence
  Description of Artificial Sequence: Synthetic peptide
HESGYGVGAYGFAY

SEQ ID NO: 1037 - protein, 18 aa, Artificial Sequence
  Description of Artificial Sequence: Synthetic peptide
PGEPYDTYITSFGFQMDY

SEQ ID NO: 1038 - protein, 15 aa, Artificial Sequence
  Description of Artificial Sequence: Synthetic peptide
GRSDYYDLHTHNFDY

SEQ ID NO: 1039 - protein, 13 aa, Artificial Sequence
  Description of Artificial Sequence: Synthetic peptide
LESKYDVGSAMDY

SEQ ID NO: 1040 - protein, 18 aa, Artificial Sequence
  Description of Artificial Sequence: Synthetic peptide
ISVRYIRTGNDYARTMDY

SEQ ID NO: 1041 - protein, 18 aa, Artificial Sequence
  Description of Artificial Sequence: Synthetic peptide
IDHWDGRWGYYHARTMDV

SEQ ID NO: 1042 - protein, 15 aa, Artificial Sequence
  Description of Artificial Sequence: Synthetic peptide
GTSRYLPLHTYYFDY

SEQ ID NO: 1043 - protein, 10 aa, Artificial Sequence
  Description of Artificial Sequence: Synthetic peptide
IRTYNYPFDY

SEQ ID NO: 1044 - protein, 13 aa, Artificial Sequence
  Description of Artificial Sequence: Synthetic peptide
HYLWYYYFAAMDY

SEQ ID NO: 1045 - protein, 10 aa, Artificial Sequence
  Description of Artificial Sequence: Synthetic peptide
IDTDNFAFDY

SEQ ID NO: 1046 - protein, 21 aa, Artificial Sequence
  Description of Artificial Sequence: Synthetic peptide
DEDYYGIFYGQNHYFGFGMDV

SEQ ID NO: 1047 - protein, 18 aa, Artificial Sequence
  Description of Artificial Sequence: Synthetic peptide
PSAYIDVSYTSFYGYFAY

SEQ ID NO: 1048 - protein, 10 aa, Artificial Sequence
  Description of Artificial Sequence: Synthetic peptide
DRDYNFAFDY

SEQ ID NO: 1049 - protein, 21 aa, Artificial Sequence
  Description of Artificial Sequence: Synthetic peptide
DRLHYGDSWRYNHHKYGGMDV

SEQ ID NO: 1050 - protein, 10 aa, Artificial Sequence
  Description of Artificial Sequence: Synthetic peptide
IRDYGYGFDY

SEQ ID NO: 1051 - protein, 13 aa, Artificial Sequence
  Description of Artificial Sequence: Synthetic peptide
SYYKHNNLAYMDY

SEQ ID NO: 1052 - protein, 13 aa, Artificial Sequence
  Description of Artificial Sequence: Synthetic peptide
HLSKYFVTNAMDY

SEQ ID NO: 1053 - protein, 18 aa, Artificial Sequence
  Description of Artificial Sequence: Synthetic peptide
IVGRDDRSGNDYYRTMDY

SEQ ID NO: 1054 - protein, 10 aa, Artificial Sequence
  Description of Artificial Sequence: Synthetic peptide
IDHDNYGFDY

SEQ ID NO: 1055 - protein, 14 aa, Artificial Sequence
  Description of Artificial Sequence: Synthetic peptide
DFFGNYVYSFWFDY

SEQ ID NO: 1056 - protein, 21 aa, Artificial Sequence
  Description of Artificial Sequence: Synthetic peptide
DELYYYIGWGHDHHFHRGMDV

SEQ ID NO: 1057 - protein, 15 aa, Artificial Sequence
  Description of Artificial Sequence: Synthetic peptide
GDRGYYSFWTHPFDY

SEQ ID NO: 1058 - protein, 10 aa, Artificial Sequence
  Description of Artificial Sequence: Synthetic peptide
DRTNGFGFDY

SEQ ID NO: 1059 - protein, 21 aa, Artificial Sequence
  Description of Artificial Sequence: Synthetic peptide
GELHRGSSTRYDFHYYRGMDV

SEQ ID NO: 1060 - protein, 18 aa, Artificial Sequence
  Description of Artificial Sequence: Synthetic peptide
PSYYDSLWRHRYYRTFDV

SEQ ID NO: 1061 - protein, 10 aa, Artificial Sequence
  Description of Artificial Sequence: Synthetic peptide
HRTDNFPFDY

SEQ ID NO: 1062 - protein, 14 aa, Artificial Sequence
  Description of Artificial Sequence: Synthetic peptide
SPFGFTYYSTYFAY

SEQ ID NO: 1063 - protein, 18 aa, Artificial Sequence
  Description of Artificial Sequence: Synthetic peptide
PRYLFGRTGNRYYYTLDV

SEQ ID NO: 1064 - protein, 13 aa, Artificial Sequence
  Description of Artificial Sequence: Synthetic peptide
HYSDYTDTSYMDY

SEQ ID NO: 1065 - protein, 10 aa, Artificial Sequence
  Description of Artificial Sequence: Synthetic peptide
DDTNNDPFDY

SEQ ID NO: 1066 - protein, 21 aa, Artificial Sequence
  Description of Artificial Sequence: Synthetic peptide
GEGHYYDSTRQRFYFYFPMDV

SEQ ID NO: 1067 - protein, 18 aa, Artificial Sequence
  Description of Artificial Sequence: Synthetic peptide
RRYRFGFWRQHHAYTFDV

SEQ ID NO: 1068 - protein, 13 aa, Artificial Sequence
  Description of Artificial Sequence: Synthetic peptide
SYLSSYDLYAMDY

SEQ ID NO: 1069 - protein, 15 aa, Artificial Sequence
  Description of Artificial Sequence: Synthetic peptide
DKDSNGILHGQNFDY

SEQ ID NO: 1070 - protein, 10 aa, Artificial Sequence
  Description of Artificial Sequence: Synthetic peptide
GYNWARKLVY

SEQ ID NO: 1071 - protein, 15 aa, Artificial Sequence
  Description of Artificial Sequence: Synthetic peptide
GKSGWYPLHGQNFDY

SEQ ID NO: 1072 - protein, 14 aa, Artificial Sequence
  Description of Artificial Sequence: Synthetic peptide
HFIYYGGFSTGFDY

SEQ ID NO: 1073 - protein, 15 aa, Artificial Sequence
  Description of Artificial Sequence: Synthetic peptide
GDQDNGGRLGYYFDY

SEQ ID NO: 1074 - protein, 10 aa, Artificial Sequence
  Description of Artificial Sequence: Synthetic peptide
DRTNYFPFDY

SEQ ID NO: 1075 - protein, 18 aa, Artificial Sequence
  Description of Artificial Sequence: Synthetic peptide
ISHYVGLWRHYYYRGFDV

SEQ ID NO: 1076 - protein, 14 aa, Artificial Sequence
  Description of Artificial Sequence: Synthetic peptide
LTSRSTDGQFAFDY

SEQ ID NO: 1077 - protein, 18 aa, Artificial Sequence
  Description of Artificial Sequence: Synthetic peptide
ISVYFDLWGYYHYYGLDY

SEQ ID NO: 1078 - protein, 14 aa, Artificial Sequence
  Description of Artificial Sequence: Synthetic peptide
LTFRFTNGYGGFDY

SEQ ID NO: 1079 - protein, 21 aa, Artificial Sequence
  Description of Artificial Sequence: Synthetic peptide
GRGYYYIGTGHRGHKHRPMDV

SEQ ID NO: 1080 - protein, 15 aa, Artificial Sequence
  Description of Artificial Sequence: Synthetic peptide
DTDSRLPYHRQPFDY

SEQ ID NO: 1081 - protein, 13 aa, Artificial Sequence
  Description of Artificial Sequence: Synthetic peptide
LYYSSYNLAAMDY

SEQ ID NO: 1082 - protein, 10 aa, Artificial Sequence
  Description of Artificial Sequence: Synthetic peptide
FYYYFDKLVY

SEQ ID NO: 1083 - protein, 10 aa, Artificial Sequence
  Description of Artificial Sequence: Synthetic peptide
GDDGNFPFDY

SEQ ID NO: 1084 - protein, 18 aa, Artificial Sequence
  Description of Artificial Sequence: Synthetic peptide
PGEYMDYEITYAPFQFAY

SEQ ID NO: 1085 - protein, 10 aa, Artificial Sequence
  Description of Artificial Sequence: Synthetic peptide
FGHSGRSFAY

SEQ ID NO: 1086 - protein, 14 aa, Artificial Sequence
  Description of Artificial Sequence: Synthetic peptide
DPIDSYYFAYGFDY

SEQ ID NO: 1087 - protein, 18 aa, Artificial Sequence
  Description of Artificial Sequence: Synthetic peptide
HGAPMSVSYTSHPFQMDY

SEQ ID NO: 1088 - protein, 10 aa, Artificial Sequence
  Description of Artificial Sequence: Synthetic peptide
FYYYGAWLDY

SEQ ID NO: 1089 - protein, 18 aa, Artificial Sequence
  Description of Artificial Sequence: Synthetic peptide
PSHYYDLWTQYYAYGLDY

SEQ ID NO: 1090 - protein, 14 aa, Artificial Sequence
  Description of Artificial Sequence: Synthetic peptide
HTISYGYSQTWFDY

SEQ ID NO: 1091 - protein, 14 aa, Artificial Sequence
  Description of Artificial Sequence: Synthetic peptide
LTGYFDVFAYGFDY

SEQ ID NO: 1092 - protein, 21 aa, Artificial Sequence
  Description of Artificial Sequence: Synthetic peptide
DRGYYYDGTTYNFGKGFPMDV

SEQ ID NO: 1093 - protein, 14 aa, Artificial Sequence
  Description of Artificial Sequence: Synthetic peptide
LSFGNDYFQYAFDY

SEQ ID NO: 1094 - protein, 18 aa, Artificial Sequence
  Description of Artificial Sequence: Synthetic peptide
KRHYDIFYGQRGARTFDV

SEQ ID NO: 1095 - protein, 15 aa, Artificial Sequence
  Description of Artificial Sequence: Synthetic peptide
DKSDYGIYWTQGFDY

SEQ ID NO: 1096 - protein, 14 aa, Artificial Sequence
  Description of Artificial Sequence: Synthetic peptide
SFSSNGGYSGAFAY

SEQ ID NO: 1097 - protein, 10 aa, Artificial Sequence
  Description of Artificial Sequence: Synthetic peptide
HLDYGYGFDY

SEQ ID NO: 1098 - protein, 21 aa, Artificial Sequence
  Description of Artificial Sequence: Synthetic peptide
DRDNYYSSTGQYFHKGRPMDV

SEQ ID NO: 1099 - protein, 15 aa, Artificial Sequence
  Description of Artificial Sequence: Synthetic peptide
GTDSYGDFYTFNFDY

SEQ ID NO: 1100 - protein, 18 aa, Artificial Sequence
  Description of Artificial Sequence: Synthetic peptide
PDVRDILWRYYYYRGMDY

SEQ ID NO: 1101 - protein, 21 aa, Artificial Sequence
  Description of Artificial Sequence: Synthetic peptide
DEGHYYDFYTHDGGYYGGMDV

SEQ ID NO: 1102 - protein, 21 aa, Artificial Sequence
  Description of Artificial Sequence: Synthetic peptide
GEDYRYSFYGYYYYKYFPMDV

SEQ ID NO: 1103 - protein, 15 aa, Artificial Sequence
  Description of Artificial Sequence: Synthetic peptide
ATSRWGPYYRQGFDY

SEQ ID NO: 1104 - protein, 18 aa, Artificial Sequence
  Description of Artificial Sequence: Synthetic peptide
PRGLYSVYTNDHARGLDY

SEQ ID NO: 1105 - protein, 10 aa, Artificial Sequence
  Description of Artificial Sequence: Synthetic peptide
GDDNNYAFDY

SEQ ID NO: 1106 - protein, 10 aa, Artificial Sequence
  Description of Artificial Sequence: Synthetic peptide
DDRNGFPFDY

SEQ ID NO: 1107 - protein, 10 aa, Artificial Sequence
  Description of Artificial Sequence: Synthetic peptide
GLHNWYAFDY

SEQ ID NO: 1108 - protein, 10 aa, Artificial Sequence
  Description of Artificial Sequence: Synthetic peptide
IRDNYFPFDY

SEQ ID NO: 1109 - protein, 18 aa, Artificial Sequence
  Description of Artificial Sequence: Synthetic peptide
IRHLFGFSTQDHARGFDV

SEQ ID NO: 1110 - protein, 21 aa, Artificial Sequence
  Description of Artificial Sequence: Synthetic peptide
DELYRGSGWGYYGYYGYPMDV

SEQ ID NO: 1111 - protein, 10 aa, Artificial Sequence
  Description of Artificial Sequence: Synthetic peptide
HDDNNFGFDY

SEQ ID NO: 1112 - protein, 10 aa, Artificial Sequence
  Description of Artificial Sequence: Synthetic peptide
GYSYAAYLDY

SEQ ID NO: 1113 - protein, 10 aa, Artificial Sequence
  Description of Artificial Sequence: Synthetic peptide
IRHGNYAFDY

SEQ ID NO: 1114 - protein, 10 aa, Artificial Sequence
  Description of Artificial Sequence: Synthetic peptide
GRRGNDPFDY

SEQ ID NO: 1115 - protein, 14 aa, Artificial Sequence
  Description of Artificial Sequence: Synthetic peptide
LFISYDDFNTAFDY

SEQ ID NO: 1116 - protein, 15 aa, Artificial Sequence
  Description of Artificial Sequence: Synthetic peptide
GTQRRTDLHTYPFDY

SEQ ID NO: 1117 - protein, 15 aa, Artificial Sequence
  Description of Artificial Sequence: Synthetic peptide
DPSRWTGWYRYPFDY

SEQ ID NO: 1118 - protein, 10 aa, Artificial Sequence
  Description of Artificial Sequence: Synthetic peptide
IDRDYFAFDY

SEQ ID NO: 1119 - protein, 14 aa, Artificial Sequence
  Description of Artificial Sequence: Synthetic peptide
STSYYYNYATWFAY

SEQ ID NO: 1120 - protein, 13 aa, Artificial Sequence
  Description of Artificial Sequence: Synthetic peptide
DYYWYFVYSAIDY

SEQ ID NO: 1121 - protein, 15 aa, Artificial Sequence
  Description of Artificial Sequence: Synthetic peptide
DRDDRGILWTYNFDY

SEQ ID NO: 1122 - protein, 18 aa, Artificial Sequence
  Description of Artificial Sequence: Synthetic peptide
IFVLFSLTGQNYYRTLDY

SEQ ID NO: 1123 - protein, 15 aa, Artificial Sequence
  Description of Artificial Sequence: Synthetic peptide
DDSDWTSLLRFNFDY

SEQ ID NO: 1124 - protein, 10 aa, Artificial Sequence
  Description of Artificial Sequence: Synthetic peptide
HDRDGYAFDY

SEQ ID NO: 1125 - protein, 14 aa, Artificial Sequence
  Description of Artificial Sequence: Synthetic peptide
LTSRFYNFQYYFAY

SEQ ID NO: 1126 - protein, 21 aa, Artificial Sequence
  Description of Artificial Sequence: Synthetic peptide
GELYYYSGSYYDYGYYYGMDV

SEQ ID NO: 1127 - protein, 13 aa, Artificial Sequence
  Description of Artificial Sequence: Synthetic peptide
DEYSYTYGYYMDY

SEQ ID NO: 1128 - protein, 10 aa, Artificial Sequence
  Description of Artificial Sequence: Synthetic peptide
HLHDNFAFDY

SEQ ID NO: 1129 - protein, 18 aa, Artificial Sequence
  Description of Artificial Sequence: Synthetic peptide
RVVLFDLTGYDYAYTFDY

SEQ ID NO: 1130 - protein, 21 aa, Artificial Sequence
  Description of Artificial Sequence: Synthetic peptide
GEDNRYISSGYDYYYHGPMDV

SEQ ID NO: 1131 - protein, 18 aa, Artificial Sequence
  Description of Artificial Sequence: Synthetic peptide
HSRPYDTSYTYFGFAMDY

SEQ ID NO: 1132 - protein, 14 aa, Artificial Sequence
  Description of Artificial Sequence: Synthetic peptide
LPFGSGYSSTAFDY

SEQ ID NO: 1133 - protein, 18 aa, Artificial Sequence
  Description of Artificial Sequence: Synthetic peptide
HSEPSDVSITSFPYTFDY

SEQ ID NO: 1134 - protein, 13 aa, Artificial Sequence
  Description of Artificial Sequence: Synthetic peptide
HGSPNTYYYYMDY

SEQ ID NO: 1135 - protein, 10 aa, Artificial Sequence
  Description of Artificial Sequence: Synthetic peptide
GYGSGAAFDY

SEQ ID NO: 1136 - protein, 21 aa, Artificial Sequence
  Description of Artificial Sequence: Synthetic peptide
DEDHYYIFWGHNYHYHRPMDV

SEQ ID NO: 1137 - protein, 13 aa, Artificial Sequence
  Description of Artificial Sequence: Synthetic peptide
DYSWHDYLNYMDY

SEQ ID NO: 1138 - protein, 21 aa, Artificial Sequence
  Description of Artificial Sequence: Synthetic peptide
DEGHYYSGWTFNHHKYGGMDV

SEQ ID NO: 1139 - protein, 18 aa, Artificial Sequence
  Description of Artificial Sequence: Synthetic peptide
IDVWDSFWGYDHARGLDV

SEQ ID NO: 1140 - protein, 14 aa, Artificial Sequence
  Description of Artificial Sequence: Synthetic peptide
HFGRFTVFQGGFAY

SEQ ID NO: 1141 - protein, 13 aa, Artificial Sequence
  Description of Artificial Sequence: Synthetic peptide
LYSSNFGYSAMDY

SEQ ID NO: 1142 - protein, 21 aa, Artificial Sequence
  Description of Artificial Sequence: Synthetic peptide
DEGHRGDSLRFDFHKHFPMDV

SEQ ID NO: 1143 - protein, 21 aa, Artificial Sequence
  Description of Artificial Sequence: Synthetic peptide
ALQYCSPTSCYVDDYFYYMDV

SEQ ID NO: 1144 - protein, 16 aa, Artificial Sequence
  Description of Artificial Sequence: Synthetic peptide
GPEWTPPGDYFYYMDD

SEQ ID NO: 1145 - protein, 7 aa, Artificial Sequence
  Description of Artificial Sequence: Synthetic peptide
WFGDYNF

SEQ ID NO: 1146 - protein, 4 aa, Artificial Sequence
  Description of Artificial Sequence: Synthetic peptide
DPPG

SEQ ID NO: 1147 - protein, 5 aa, Artificial Sequence
  Description of Artificial Sequence: Synthetic peptide
DRGGL

SEQ ID NO: 1148 - protein, 18 aa, Artificial Sequence
  Description of Artificial Sequence: Synthetic peptide
EDDYYDGTGYYQYYGMDV

SEQ ID NO: 1149 - protein, 5 aa, Artificial Sequence
  Description of Artificial Sequence: Synthetic peptide
DRGGS

SEQ ID NO: 1150 - protein, 12 aa, Artificial Sequence
  Description of Artificial Sequence: Synthetic peptide
EGCSSTSCYLDP

SEQ ID NO: 1151 - protein, 9 aa, Artificial Sequence
  Description of Artificial Sequence: Synthetic peptide
TLSPYAMDV

SEQ ID NO: 1152 - protein, 16 aa, Artificial Sequence
  Description of Artificial Sequence: Synthetic peptide
GPEWTPPGDYFYYMDD

SEQ ID NO: 1153 - protein, 12 aa, Artificial Sequence
  Description of Artificial Sequence: Synthetic peptide
YLEMSPGEYFDN

SEQ ID NO: 1154 - protein, 10 aa, Artificial Sequence
  Description of Artificial Sequence: Synthetic peptide
YWRTGDWFDP

SEQ ID NO: 1155 - protein, 11 aa, Artificial Sequence
  Description of Artificial Sequence: Synthetic peptide
DRTGSGWFRDV

SEQ ID NO: 1156 - protein, 11 aa, Artificial Sequence
  Description of Artificial Sequence: Synthetic peptide
SGLDDGYYPED

SEQ ID NO: 1157 - protein, 4 aa, Artificial Sequence
  Description of Artificial Sequence: Synthetic peptide
DPPG

SEQ ID NO: 1158 - protein, 4 aa, Artificial Sequence
  Description of Artificial Sequence: Synthetic peptide
DMGG

SEQ ID NO: 1159 - protein, 11 aa, Artificial Sequence
  Description of Artificial Sequence: Synthetic peptide
VYYDSSGYNDY

SEQ ID NO: 1160 - protein, 16 aa, Artificial Sequence
  Description of Artificial Sequence: Synthetic peptide
GPEWTPPGDYFYYMDD

SEQ ID NO: 1161 - protein, 8 aa, Artificial Sequence
  Description of Artificial Sequence: Synthetic peptide
GMVRGVDF

SEQ ID NO: 1162 - protein, 13 aa, Artificial Sequence
  Description of Artificial Sequence: Synthetic peptide
LFAQYSDYDYVAE

SEQ ID NO: 1163 - protein, 6 aa, Artificial Sequence
  Description of Artificial Sequence: Synthetic peptide
GRPVPR

SEQ ID NO: 1164 - protein, 19 aa, Artificial Sequence
  Description of Artificial Sequence: Synthetic peptide
SDYDVVSGLTNDYLYYLDD

SEQ ID NO: 1165 - protein, 20 aa, Artificial Sequence
  Description of Artificial Sequence: Synthetic peptide
TSYYYSSGSSFSGRLDYLDD

SEQ ID NO: 1166 - protein, 7 aa, Artificial Sequence
  Description of Artificial Sequence: Synthetic peptide
IFVGMDV

SEQ ID NO: 1167 - protein, 11 aa, Artificial Sequence
  Description of Artificial Sequence: Synthetic peptide
VYYDSSGYNDY

SEQ ID NO: 1168 - protein, 16 aa, Artificial Sequence
  Description of Artificial Sequence: Synthetic peptide
RSSQSLVHSDGKTYLE

SEQ ID NO: 1169 - protein, 16 aa, Artificial Sequence
  Description of Artificial Sequence: Synthetic peptide
RSSQSLVNSDGKTYLH

SEQ ID NO: 1170 - protein, 16 aa, Artificial Sequence
  Description of Artificial Sequence: Synthetic peptide
RSSQSLVHSDGNTYLA

SEQ ID NO: 1171 - protein, 16 aa, Artificial Sequence
  Description of Artificial Sequence: Synthetic peptide
RSSQSLVHSDGKTYLH

SEQ ID NO: 1172 - protein, 16 aa, Artificial Sequence
  Description of Artificial Sequence: Synthetic peptide
RSSQSLVHSNGKTYLH

SEQ ID NO: 1173 - protein, 16 aa, Artificial Sequence
  Description of Artificial Sequence: Synthetic peptide
RSSQSLVHSDGKTYLA

SEQ ID NO: 1174 - protein, 16 aa, Artificial Sequence
  Description of Artificial Sequence: Synthetic peptide
RSSQSLVHSDGKTYLH

SEQ ID NO: 1175 - protein, 16 aa, Artificial Sequence
  Description of Artificial Sequence: Synthetic peptide
RSSQSLVNSDGNTYLA

SEQ ID NO: 1176 - protein, 16 aa, Artificial Sequence
  Description of Artificial Sequence: Synthetic peptide
RSSQSLVHSNGNTYLA

SEQ ID NO: 1177 - protein, 16 aa, Artificial Sequence
  Description of Artificial Sequence: Synthetic peptide
RSSQSLVHSDGNTYLH

SEQ ID NO: 1178 - protein, 16 aa, Artificial Sequence
  Description of Artificial Sequence: Synthetic peptide
RSSQSLVNSDGKTYLA

SEQ ID NO: 1179 - protein, 16 aa, Artificial Sequence
  Description of Artificial Sequence: Synthetic peptide
RSSQSLVNSNGNTYLE

SEQ ID NO: 1180 - protein, 16 aa, Artificial Sequence
  Description of Artificial Sequence: Synthetic peptide
RSSQSLVNSNGKTYLA

SEQ ID NO: 1181 - protein, 16 aa, Artificial Sequence
  Description of Artificial Sequence: Synthetic peptide
RSSQSLVHSNGKTYLE

SEQ ID NO: 1182 - protein, 16 aa, Artificial Sequence
  Description of Artificial Sequence: Synthetic peptide
RSSQSLVHSDGNTYLA

SEQ ID NO: 1183 - protein, 16 aa, Artificial Sequence
  Description of Artificial Sequence: Synthetic peptide
RSSQSLVNSNGKTYLA

SEQ ID NO: 1184 - protein, 16 aa, Artificial Sequence
  Description of Artificial Sequence: Synthetic peptide
RSSQSLVNSNSNTYLE

SEQ ID NO: 1185 - protein, 16 aa, Artificial Sequence
  Description of Artificial Sequence: Synthetic peptide
RSSQSLVNSNGNTYLH

SEQ ID NO: 1186 - protein, 16 aa, Artificial Sequence
  Description of Artificial Sequence: Synthetic peptide
RSSQSLVHSNGKTYLH

SEQ ID NO: 1187 - protein, 16 aa, Artificial Sequence
  Description of Artificial Sequence: Synthetic peptide
RSSQSLVNSDGNTYLE

SEQ ID NO: 1188 - protein, 16 aa, Artificial Sequence
  Description of Artificial Sequence: Synthetic peptide
RSSQSLVNSDGNTYLH

SEQ ID NO: 1189 - protein, 16 aa, Artificial Sequence
  Description of Artificial Sequence: Synthetic peptide
RSSQSLVHSNGKTYLA

SEQ ID NO: 1190 - protein, 16 aa, Artificial Sequence
  Description of Artificial Sequence: Synthetic peptide
RSSQSLVNSDGKTYLH

SEQ ID NO: 1191 - protein, 16 aa, Artificial Sequence
  Description of Artificial Sequence: Synthetic peptide
RSSQSLVHSDGKTYLA

SEQ ID NO: 1192 - protein, 16 aa, Artificial Sequence
  Description of Artificial Sequence: Synthetic peptide
RSSQSLVHSDGKTYLH

SEQ ID NO: 1193 - protein, 16 aa, Artificial Sequence
  Description of Artificial Sequence: Synthetic peptide
RSSQSLVHSDGNTYLA

SEQ ID NO: 1194 - protein, 16 aa, Artificial Sequence
  Description of Artificial Sequence: Synthetic peptide
RSSQSLVNSDGNTYLH

SEQ ID NO: 1195 - protein, 16 aa, Artificial Sequence
  Description of Artificial Sequence: Synthetic peptide
RSSQSLVNSNGNTYLH

SEQ ID NO: 1196 - protein, 16 aa, Artificial Sequence
  Description of Artificial Sequence: Synthetic peptide
RSSQSLVHSDGNTYLA

SEQ ID NO: 1197 - protein, 16 aa, Artificial Sequence
  Description of Artificial Sequence: Synthetic peptide
RSSQSLVHSNGNTYLH

SEQ ID NO: 1198 - protein, 16 aa, Artificial Sequence
  Description of Artificial Sequence: Synthetic peptide
RSSQSLVHSNGKTYLE

SEQ ID NO: 1199 - protein, 16 aa, Artificial Sequence
  Description of Artificial Sequence: Synthetic peptide
RSSQSLVHSDGKTYLA

SEQ ID NO: 1200 - protein, 16 aa, Artificial Sequence
  Description of Artificial Sequence: Synthetic peptide
RSSQSLVHSDGNTYLE

SEQ ID NO: 1201 - protein, 16 aa, Artificial Sequence
  Description of Artificial Sequence: Synthetic peptide
RSSQSLVNSDGKTYLE

SEQ ID NO: 1202 - protein, 16 aa, Artificial Sequence
  Description of Artificial Sequence: Synthetic peptide
RSSQSLVHSNGNTYLH

SEQ ID NO: 1203 - protein, 16 aa, Artificial Sequence
  Description of Artificial Sequence: Synthetic peptide
RSSQSLVNSNGNTYLH

SEQ ID NO: 1204 - protein, 16 aa, Artificial Sequence
  Description of Artificial Sequence: Synthetic peptide
RSSQSLVHSDGNTYLE

SEQ ID NO: 1205 - protein, 16 aa, Artificial Sequence
  Description of Artificial Sequence: Synthetic peptide
RSSQSLVNSNGKTYLE

SEQ ID NO: 1206 - protein, 16 aa, Artificial Sequence
  Description of Artificial Sequence: Synthetic peptide
RSSQSLVHSDGNTYLH

SEQ ID NO: 1207 - protein, 16 aa, Artificial Sequence
  Description of Artificial Sequence: Synthetic peptide
RSSQSLVHSDGKTYLA

SEQ ID NO: 1208 - protein, 16 aa, Artificial Sequence
  Description of Artificial Sequence: Synthetic peptide
RSSQSLVHSDGKTYLH

SEQ ID NO: 1209 - protein, 16 aa, Artificial Sequence
  Description of Artificial Sequence: Synthetic peptide
RSSQSLVNSNGNTYLE

SEQ ID NO: 1210 - protein, 16 aa, Artificial Sequence
  Description of Artificial Sequence: Synthetic peptide
RSSQSLVHSNGKTYLA

SEQ ID NO: 1211 - protein, 16 aa, Artificial Sequence
  Description of Artificial Sequence: Synthetic peptide
RSSQSLVNSNGNTYLH

SEQ ID NO: 1212 - protein, 16 aa, Artificial Sequence
  Description of Artificial Sequence: Synthetic peptide
RSSQSLVNSDGKTYLH

SEQ ID NO: 1213 - protein, 16 aa, Artificial Sequence
  Description of Artificial Sequence: Synthetic peptide
RSSQSLVNSDGNTYLA

SEQ ID NO: 1214 - protein, 16 aa, Artificial Sequence
  Description of Artificial Sequence: Synthetic peptide
RSSQSLVNSDGNTYLH

SEQ ID NO: 1215 - protein, 16 aa, Artificial Sequence
  Description of Artificial Sequence: Synthetic peptide
RSSQSLVHSNGKTYLA

SEQ ID NO: 1216 - protein, 16 aa, Artificial Sequence
  Description of Artificial Sequence: Synthetic peptide
RSSQSLVHSNGKTYLH

SEQ ID NO: 1217 - protein, 16 aa, Artificial Sequence
  Description of Artificial Sequence: Synthetic peptide
RSSQSLVNSDGNTYLE

SEQ ID NO: 1218 - protein, 16 aa, Artificial Sequence
  Description of Artificial Sequence: Synthetic peptide
RSSQSLVHSDGKTYLH

SEQ ID NO: 1219 - protein, 16 aa, Artificial Sequence
  Description of Artificial Sequence: Synthetic peptide
RSSQSLVHSNGNTYLA

SEQ ID NO: 1220 - protein, 16 aa, Artificial Sequence
  Description of Artificial Sequence: Synthetic peptide
RSSQSLVNSDGKTYLH

SEQ ID NO: 1221 - protein, 16 aa, Artificial Sequence
  Description of Artificial Sequence: Synthetic peptide
RSSQSLVHSNGNTYLH

SEQ ID NO: 1222 - protein, 16 aa, Artificial Sequence
  Description of Artificial Sequence: Synthetic peptide
RSSQSLVNSDGKTYLE

SEQ ID NO: 1223 - protein, 16 aa, Artificial Sequence
  Description of Artificial Sequence: Synthetic peptide
RSSQSLVHSDGNTYLA

SEQ ID NO: 1224 - protein, 16 aa, Artificial Sequence
  Description of Artificial Sequence: Synthetic peptide
RSSQSLVHSDGKTYLA

SEQ ID NO: 1225 - protein, 16 aa, Artificial Sequence
  Description of Artificial Sequence: Synthetic peptide
RSSQSLVNSDGNTYLE

SEQ ID NO: 1226 - protein, 16 aa, Artificial Sequence
  Description of Artificial Sequence: Synthetic peptide
RSSQSLVHSDGKTYLE

SEQ ID NO: 1227 - protein, 16 aa, Artificial Sequence
  Description of Artificial Sequence: Synthetic peptide
RSSQSLVHSDGKTYLA

SEQ ID NO: 1228 - protein, 16 aa, Artificial Sequence
  Description of Artificial Sequence: Synthetic peptide
RSSQSLVHSDGKTYLH

SEQ ID NO: 1229 - protein, 16 aa, Artificial Sequence
  Description of Artificial Sequence: Synthetic peptide
RSSQSLVHSNGKTYLA

SEQ ID NO: 1230 - protein, 16 aa, Artificial Sequence
  Description of Artificial Sequence: Synthetic peptide
RSSQSLVNSNGKTYLA

SEQ ID NO: 1231 - protein, 16 aa, Artificial Sequence
  Description of Artificial Sequence: Synthetic peptide
RSSQSLVHSNGNTYLA

SEQ ID NO: 1232 - protein, 16 aa, Artificial Sequence
  Description of Artificial Sequence: Synthetic peptide
RSSQSLVNSNGKTYLH

SEQ ID NO: 1233 - protein, 16 aa, Artificial Sequence
  Description of Artificial Sequence: Synthetic peptide
RSSQSLVHSDGNTYLA

SEQ ID NO: 1234 - protein, 16 aa, Artificial Sequence
  Description of Artificial Sequence: Synthetic peptide
RSSQSLVNSDGNTYLA

SEQ ID NO: 1235 - protein, 16 aa, Artificial Sequence
  Description of Artificial Sequence: Synthetic peptide
RSSQSLVHSNGKTYLA

SEQ ID NO: 1236 - protein, 16 aa, Artificial Sequence
  Description of Artificial Sequence: Synthetic peptide
RSSQSLVHSNGNTYLA

SEQ ID NO: 1237 - protein, 16 aa, Artificial Sequence
  Description of Artificial Sequence: Synthetic peptide
RSSQSLVNSDGKTYLA

SEQ ID NO: 1238 - protein, 16 aa, Artificial Sequence
  Description of Artificial Sequence: Synthetic peptide
RSSQSLVNINGKTYLH

SEQ ID NO: 1239 - protein, 16 aa, Artificial Sequence
  Description of Artificial Sequence: Synthetic peptide
RSSQSLVHSNGNTYLE

SEQ ID NO: 1240 - protein, 16 aa, Artificial Sequence
  Description of Artificial Sequence: Synthetic peptide
RSSQSLVHSNGNTYLH

SEQ ID NO: 1241 - protein, 16 aa, Artificial Sequence
  Description of Artificial Sequence: Synthetic peptide
RSSQSLVNSDGKTYLE

SEQ ID NO: 1242 - protein, 16 aa, Artificial Sequence
  Description of Artificial Sequence: Synthetic peptide
RSSQSLVNSNGNTYLE

SEQ ID NO: 1243 - protein, 16 aa, Artificial Sequence
  Description of Artificial Sequence: Synthetic peptide
RSSQSLVNSDGNTYLA

SEQ ID NO: 1244 - protein, 16 aa, Artificial Sequence
  Description of Artificial Sequence: Synthetic peptide
RSSQSLVNSNGNTYLH

SEQ ID NO: 1245 - protein, 16 aa, Artificial Sequence
  Description of Artificial Sequence: Synthetic peptide
RSSQSLVHSNGKTYLE

SEQ ID NO: 1246 - protein, 16 aa, Artificial Sequence
  Description of Artificial Sequence: Synthetic peptide
RSSQSLVHSNGKTYLE

SEQ ID NO: 1247 - protein, 16 aa, Artificial Sequence
  Description of Artificial Sequence: Synthetic peptide
RSSQSLVHSDGKTYLH

SEQ ID NO: 1248 - protein, 16 aa, Artificial Sequence
  Description of Artificial Sequence: Synthetic peptide
RSSQSLVHSDGNTYLA

SEQ ID NO: 1249 - protein, 16 aa, Artificial Sequence
  Description of Artificial Sequence: Synthetic peptide
RSSQSLVHSDGKTYLH

SEQ ID NO: 1250 - protein, 16 aa, Artificial Sequence
  Description of Artificial Sequence: Synthetic peptide
RSSQSLVNSDGKTYLA

SEQ ID NO: 1251 - protein, 16 aa, Artificial Sequence
  Description of Artificial Sequence: Synthetic peptide
RSSQSLVNSNGKTYLE

SEQ ID NO: 1252 - protein, 16 aa, Artificial Sequence
  Description of Artificial Sequence: Synthetic peptide
RSSQSLVNSDGNTYLA

SEQ ID NO: 1253 - protein, 16 aa, Artificial Sequence
  Description of Artificial Sequence: Synthetic peptide
RSSQSLVHSNGNTYLH

SEQ ID NO: 1254 - protein, 16 aa, Artificial Sequence
  Description of Artificial Sequence: Synthetic peptide
RSSQSLVHSDGNTYLE

SEQ ID NO: 1255 - protein, 16 aa, Artificial Sequence
  Description of Artificial Sequence: Synthetic peptide
RSSQSLVNSDGKTYLA

SEQ ID NO: 1256 - protein, 16 aa, Artificial Sequence
  Description of Artificial Sequence: Synthetic peptide
RSSQSLVNSDGKTYLE

SEQ ID NO: 1257 - protein, 16 aa, Artificial Sequence
  Description of Artificial Sequence: Synthetic peptide
RSSQSLVHSNGKTYLH

SEQ ID NO: 1258 - protein, 16 aa, Artificial Sequence
  Description of Artificial Sequence: Synthetic peptide
RSSQSLVNSNGKTYLA

SEQ ID NO: 1259 - protein, 16 aa, Artificial Sequence
  Description of Artificial Sequence: Synthetic peptide
RSSQSLVHSNGKTYLA

SEQ ID NO: 1260 - protein, 16 aa, Artificial Sequence
  Description of Artificial Sequence: Synthetic peptide
RSSQSLVHSDGKTYLH

SEQ ID NO: 1261 - protein, 16 aa, Artificial Sequence
  Description of Artificial Sequence: Synthetic peptide
RSSQSLVNSNGKTYLA

SEQ ID NO: 1262 - protein, 16 aa, Artificial Sequence
  Description of Artificial Sequence: Synthetic peptide
RSSQSLVHSNGKTYLE

SEQ ID NO: 1263 - protein, 16 aa, Artificial Sequence
  Description of Artificial Sequence: Synthetic peptide
RSSQSLVHSDGKTYLH

SEQ ID NO: 1264 - protein, 16 aa, Artificial Sequence
  Description of Artificial Sequence: Synthetic peptide
RSSQSLVHSNGNTYLH

SEQ ID NO: 1265 - protein, 16 aa, Artificial Sequence
  Description of Artificial Sequence: Synthetic peptide
RSSQSLVHSNGNTYLA

SEQ ID NO: 1266 - protein, 16 aa, Artificial Sequence
  Description of Artificial Sequence: Synthetic peptide
RSSQSLVHSNGNTYLH

SEQ ID NO: 1267 - protein, 16 aa, Artificial Sequence
  Description of Artificial Sequence: Synthetic peptide
RSSQSLVNSDGNTYLA

SEQ ID NO: 1268 - protein, 8 aa, Artificial Sequence
  Description of Artificial Sequence: Synthetic peptide
KVSNRASG

SEQ ID NO: 1269 - protein, 8 aa, Artificial Sequence
  Description of Artificial Sequence: Synthetic peptide
KASNRASG

SEQ ID NO: 1270 - protein, 8 aa, Artificial Sequence
  Description of Artificial Sequence: Synthetic peptide
KASNRFSG

SEQ ID NO: 1271 - protein, 8 aa, Artificial Sequence
  Description of Artificial Sequence: Synthetic peptide
KVSNRASG

SEQ ID NO: 1272 - protein, 8 aa, Artificial Sequence
  Description of Artificial Sequence: Synthetic peptide
KASNRASG

SEQ ID NO: 1273 - protein, 8 aa, Artificial Sequence
  Description of Artificial Sequence: Synthetic peptide
KASNRASG

SEQ ID NO: 1274 - protein, 8 aa, Artificial Sequence
  Description of Artificial Sequence: Synthetic peptide
KASNRASG

SEQ ID NO: 1275 - protein, 8 aa, Artificial Sequence
  Description of Artificial Sequence: Synthetic peptide
KVSNRASG

SEQ ID NO: 1276 - protein, 8 aa, Artificial Sequence
  Description of Artificial Sequence: Synthetic peptide
KASNRASG

SEQ ID NO: 1277 - protein, 8 aa, Artificial Sequence
  Description of Artificial Sequence: Synthetic peptide
KASNRFSG

SEQ ID NO: 1278 - protein, 8 aa, Artificial Sequence
  Description of Artificial Sequence: Synthetic peptide
KASNRFSG

SEQ ID NO: 1279 - protein, 8 aa, Artificial Sequence
  Description of Artificial Sequence: Synthetic peptide
KVSNRASG

SEQ ID NO: 1280 - protein, 8 aa, Artificial Sequence
  Description of Artificial Sequence: Synthetic peptide
KASNRFSG

SEQ ID NO: 1281 - protein, 8 aa, Artificial Sequence
  Description of Artificial Sequence: Synthetic peptide
KVSNRASG

SEQ ID NO: 1282 - protein, 8 aa, Artificial Sequence
  Description of Artificial Sequence: Synthetic peptide
KASNRASG

SEQ ID NO: 1283 - protein, 8 aa, Artificial Sequence
  Description of Artificial Sequence: Synthetic peptide
KVSNRASG

SEQ ID NO: 1284 - protein, 8 aa, Artificial Sequence
  Description of Artificial Sequence: Synthetic peptide
KVSNRASG

SEQ ID NO: 1285 - protein, 8 aa, Artificial Sequence
  Description of Artificial Sequence: Synthetic peptide
KASNRASG

SEQ ID NO: 1286 - protein, 8 aa, Artificial Sequence
  Description of Artificial Sequence: Synthetic peptide
KASNRASG

SEQ ID NO: 1287 - protein, 8 aa, Artificial Sequence
  Description of Artificial Sequence: Synthetic peptide
KASNRASG

SEQ ID NO: 1288 - protein, 8 aa, Artificial Sequence
  Description of Artificial Sequence: Synthetic peptide
KVSNRFSG

SEQ ID NO: 1289 - protein, 8 aa, Artificial Sequence
  Description of Artificial Sequence: Synthetic peptide
KASNRASG

SEQ ID NO: 1290 - protein, 8 aa, Artificial Sequence
  Description of Artificial Sequence: Synthetic peptide
KVSNRFSG

SEQ ID NO: 1291 - protein, 8 aa, Artificial Sequence
  Description of Artificial Sequence: Synthetic peptide
KVSNRASG

SEQ ID NO: 1292 - protein, 8 aa, Artificial Sequence
  Description of Artificial Sequence: Synthetic peptide
KASNRASG

SEQ ID NO: 1293 - protein, 8 aa, Artificial Sequence
  Description of Artificial Sequence: Synthetic peptide
KVSNRFSG

SEQ ID NO: 1294 - protein, 8 aa, Artificial Sequence
  Description of Artificial Sequence: Synthetic peptide
KASNRFSG

SEQ ID NO: 1295 - protein, 8 aa, Artificial Sequence
  Description of Artificial Sequence: Synthetic peptide
KASNRASG

SEQ ID NO: 1296 - protein, 8 aa, Artificial Sequence
  Description of Artificial Sequence: Synthetic peptide
KASNRASG

SEQ ID NO: 1297 - protein, 8 aa, Artificial Sequence
  Description of Artificial Sequence: Synthetic peptide
KVSNRASG

SEQ ID NO: 1298 - protein, 8 aa, Artificial Sequence
  Description of Artificial Sequence: Synthetic peptide
KVSNRASG

SEQ ID NO: 1299 - protein, 8 aa, Artificial Sequence
  Description of Artificial Sequence: Synthetic peptide
KASNRFSG

SEQ ID NO: 1300 - protein, 8 aa, Artificial Sequence
  Description of Artificial Sequence: Synthetic peptide
KASNRFSG

SEQ ID NO: 1301 - protein, 8 aa, Artificial Sequence
  Description of Artificial Sequence: Synthetic peptide
KVSNRASG

SEQ ID NO: 1302 - protein, 8 aa, Artificial Sequence
  Description of Artificial Sequence: Synthetic peptide
KASNRASG

SEQ ID NO: 1303 - protein, 8 aa, Artificial Sequence
  Description of Artificial Sequence: Synthetic peptide
KASNRASG

SEQ ID NO: 1304 - protein, 8 aa, Artificial Sequence
  Description of Artificial Sequence: Synthetic peptide
KASNRASG

SEQ ID NO: 1305 - protein, 8 aa, Artificial Sequence
  Description of Artificial Sequence: Synthetic peptide
KVSNRASG

SEQ ID NO: 1306 - protein, 8 aa, Artificial Sequence
  Description of Artificial Sequence: Synthetic peptide
KASNRASG

SEQ ID NO: 1307 - protein, 8 aa, Artificial Sequence
  Description of Artificial Sequence: Synthetic peptide
KVSNRFSG

SEQ ID NO: 1308 - protein, 8 aa, Artificial Sequence
  Description of Artificial Sequence: Synthetic peptide
KASNRASG

SEQ ID NO: 1309 - protein, 8 aa, Artificial Sequence
  Description of Artificial Sequence: Synthetic peptide
KVSNRFSG

SEQ ID NO: 1310 - protein, 8 aa, Artificial Sequence
  Description of Artificial Sequence: Synthetic peptide
KASNRASG

SEQ ID NO: 1311 - protein, 8 aa, Artificial Sequence
  Description of Artificial Sequence: Synthetic peptide
KASNRASG

SEQ ID NO: 1312 - protein, 8 aa, Artificial Sequence
  Description of Artificial Sequence: Synthetic peptide
KASNRFSG

SEQ ID NO: 1313 - protein, 8 aa, Artificial Sequence
  Description of Artificial Sequence: Synthetic peptide
KVSNRASG

SEQ ID NO: 1314 - protein, 8 aa, Artificial Sequence
  Description of Artificial Sequence: Synthetic peptide
KASNRFSG

SEQ ID NO: 1315 - protein, 8 aa, Artificial Sequence
  Description of Artificial Sequence: Synthetic peptide
KVSNRASG

SEQ ID NO: 1316 - protein, 8 aa, Artificial Sequence
  Description of Artificial Sequence: Synthetic peptide
KASNRFSG

SEQ ID NO: 1317 - protein, 8 aa, Artificial Sequence
  Description of Artificial Sequence: Synthetic peptide
KASNRFSG

SEQ ID NO: 1318 - protein, 8 aa, Artificial Sequence
  Description of Artificial Sequence: Synthetic peptide
KASNRASG

SEQ ID NO: 1319 - protein, 8 aa, Artificial Sequence
  Description of Artificial Sequence: Synthetic peptide
KVSNRFSG

SEQ ID NO: 1320 - protein, 8 aa, Artificial Sequence
  Description of Artificial Sequence: Synthetic peptide
KVSNRASG

SEQ ID NO: 1321 - protein, 8 aa, Artificial Sequence
  Description of Artificial Sequence: Synthetic peptide
KVSNRFSG

SEQ ID NO: 1322 - protein, 8 aa, Artificial Sequence
  Description of Artificial Sequence: Synthetic peptide
KVSNRASG

SEQ ID NO: 1323 - protein, 8 aa, Artificial Sequence
  Description of Artificial Sequence: Synthetic peptide
KASNRASG

SEQ ID NO: 1324 - protein, 8 aa, Artificial Sequence
  Description of Artificial Sequence: Synthetic peptide
KASNRFSG

SEQ ID NO: 1325 - protein, 8 aa, Artificial Sequence
  Description of Artificial Sequence: Synthetic peptide
KASNRFSG

SEQ ID NO: 1326 - protein, 8 aa, Artificial Sequence
  Description of Artificial Sequence: Synthetic peptide
KASNRASG

SEQ ID NO: 1327 - protein, 8 aa, Artificial Sequence
  Description of Artificial Sequence: Synthetic peptide
KVSNRFSG

SEQ ID NO: 1328 - protein, 8 aa, Artificial Sequence
  Description of Artificial Sequence: Synthetic peptide
KASNRASG

SEQ ID NO: 1329 - protein, 8 aa, Artificial Sequence
  Description of Artificial Sequence: Synthetic peptide
KASNRFSG

SEQ ID NO: 1330 - protein, 8 aa, Artificial Sequence
  Description of Artificial Sequence: Synthetic peptide
KASNRFSG

SEQ ID NO: 1331 - protein, 8 aa, Artificial Sequence
  Description of Artificial Sequence: Synthetic peptide
KASNRASG

SEQ ID NO: 1332 - protein, 8 aa, Artificial Sequence
  Description of Artificial Sequence: Synthetic peptide
KASNRFSG

SEQ ID NO: 1333 - protein, 8 aa, Artificial Sequence
  Description of Artificial Sequence: Synthetic peptide
KASNRFSG

SEQ ID NO: 1334 - protein, 8 aa, Artificial Sequence
  Description of Artificial Sequence: Synthetic peptide
KASNRASG

SEQ ID NO: 1335 - protein, 8 aa, Artificial Sequence
  Description of Artificial Sequence: Synthetic peptide
KVSNRASG

SEQ ID NO: 1336 - protein, 8 aa, Artificial Sequence
  Description of Artificial Sequence: Synthetic peptide
KVSNRFSG

SEQ ID NO: 1337 - protein, 8 aa, Artificial Sequence
  Description of Artificial Sequence: Synthetic peptide
KVSNRFSG

SEQ ID NO: 1338 - protein, 8 aa, Artificial Sequence
  Description of Artificial Sequence: Synthetic peptide
KASNRASG

SEQ ID NO: 1339 - protein, 8 aa, Artificial Sequence
  Description of Artificial Sequence: Synthetic peptide
KVSNRASG

SEQ ID NO: 1340 - protein, 8 aa, Artificial Sequence
  Description of Artificial Sequence: Synthetic peptide
KASNRFSG

SEQ ID NO: 1341 - protein, 8 aa, Artificial Sequence
  Description of Artificial Sequence: Synthetic peptide
KVSNRASG

SEQ ID NO: 1342 - protein, 8 aa, Artificial Sequence
  Description of Artificial Sequence: Synthetic peptide
KASNRASG

SEQ ID NO: 1343 - protein, 8 aa, Artificial Sequence
  Description of Artificial Sequence: Synthetic peptide
KASNRFSG

SEQ ID NO: 1344 - protein, 8 aa, Artificial Sequence
  Description of Artificial Sequence: Synthetic peptide
KVSNRFSG

SEQ ID NO: 1345 - protein, 8 aa, Artificial Sequence
  Description of Artificial Sequence: Synthetic peptide
KVSNRFSG

SEQ ID NO: 1346 - protein, 8 aa, Artificial Sequence
  Description of Artificial Sequence: Synthetic peptide
KVSNRASG

SEQ ID NO: 1347 - protein, 8 aa, Artificial Sequence
  Description of Artificial Sequence: Synthetic peptide
KVSNRASG

SEQ ID NO: 1348 - protein, 8 aa, Artificial Sequence
  Description of Artificial Sequence: Synthetic peptide
KASNRFSG

SEQ ID NO: 1349 - protein, 8 aa, Artificial Sequence
  Description of Artificial Sequence: Synthetic peptide
KASNRFSG

SEQ ID NO: 1350 - protein, 8 aa, Artificial Sequence
  Description of Artificial Sequence: Synthetic peptide
KVSNRASG

SEQ ID NO: 1351 - protein, 8 aa, Artificial Sequence
  Description of Artificial Sequence: Synthetic peptide
KASNRASG

SEQ ID NO: 1352 - protein, 8 aa, Artificial Sequence
  Description of Artificial Sequence: Synthetic peptide
KASNRASG

SEQ ID NO: 1353 - protein, 8 aa, Artificial Sequence
  Description of Artificial Sequence: Synthetic peptide
KVSNRASG

SEQ ID NO: 1354 - protein, 8 aa, Artificial Sequence
  Description of Artificial Sequence: Synthetic peptide
KASNRFSG

SEQ ID NO: 1355 - protein, 8 aa, Artificial Sequence
  Description of Artificial Sequence: Synthetic peptide
KASNRASG

SEQ ID NO: 1356 - protein, 8 aa, Artificial Sequence
  Description of Artificial Sequence: Synthetic peptide
KVSNRASG

SEQ ID NO: 1357 - protein, 8 aa, Artificial Sequence
  Description of Artificial Sequence: Synthetic peptide
KVSNRFSG

SEQ ID NO: 1358 - protein, 8 aa, Artificial Sequence
  Description of Artificial Sequence: Synthetic peptide
KVSNRASG

SEQ ID NO: 1359 - protein, 8 aa, Artificial Sequence
  Description of Artificial Sequence: Synthetic peptide
KVSNRFSG

SEQ ID NO: 1360 - protein, 8 aa, Artificial Sequence
  Description of Artificial Sequence: Synthetic peptide
KASNRASG

SEQ ID NO: 1361 - protein, 8 aa, Artificial Sequence
  Description of Artificial Sequence: Synthetic peptide
KVSNRASG

SEQ ID NO: 1362 - protein, 8 aa, Artificial Sequence
  Description of Artificial Sequence: Synthetic peptide
KASNRASG

SEQ ID NO: 1363 - protein, 8 aa, Artificial Sequence
  Description of Artificial Sequence: Synthetic peptide
KASNRASG

SEQ ID NO: 1364 - protein, 8 aa, Artificial Sequence
  Description of Artificial Sequence: Synthetic peptide
KVSNRFSG

SEQ ID NO: 1365 - protein, 8 aa, Artificial Sequence
  Description of Artificial Sequence: Synthetic peptide
KVSNRASG

SEQ ID NO: 1366 - protein, 8 aa, Artificial Sequence
  Description of Artificial Sequence: Synthetic peptide
KASNRFSG

SEQ ID NO: 1367 - protein, 8 aa, Artificial Sequence
  Description of Artificial Sequence: Synthetic peptide
KVSNRASG

SEQ ID NO: 1368 - protein, 8 aa, Artificial Sequence
  Description of Artificial Sequence: Synthetic peptide
KASNRASG

SEQ ID NO: 1369 - protein, 8 aa, Artificial Sequence
  Description of Artificial Sequence: Synthetic peptide
KVSNRFSG

SEQ ID NO: 1370 - protein, 8 aa, Artificial Sequence
  Description of Artificial Sequence: Synthetic peptide
KVSNRASG

SEQ ID NO: 1371 - protein, 8 aa, Artificial Sequence
  Description of Artificial Sequence: Synthetic peptide
KVSNRFSG

SEQ ID NO: 1372 - protein, 9 aa, Artificial Sequence
  Description of Artificial Sequence: Synthetic peptide
FQSSSTPFT

SEQ ID NO: 1373 - protein, 9 aa, Artificial Sequence
  Description of Artificial Sequence: Synthetic peptide
QQSYHYPFT

SEQ ID NO: 1374 - protein, 9 aa, Artificial Sequence
  Description of Artificial Sequence: Synthetic peptide
FQGSHYPFT

SEQ ID NO: 1375 - protein, 9 aa, Artificial Sequence
  Description of Artificial Sequence: Synthetic peptide
QQSYSYPLT

SEQ ID NO: 1376 - protein, 9 aa, Artificial Sequence
  Description of Artificial Sequence: Synthetic peptide
FQSYHTPLT

SEQ ID NO: 1377 - protein, 9 aa, Artificial Sequence
  Description of Artificial Sequence: Synthetic peptide
FQSYEVPLT

SEQ ID NO: 1378 - protein, 9 aa, Artificial Sequence
  Description of Artificial Sequence: Synthetic peptide
QQGSEYPFT

SEQ ID NO: 1379 - protein, 9 aa, Artificial Sequence
  Description of Artificial Sequence: Synthetic peptide
QQSSSVPLT

SEQ ID NO: 1380 - protein, 9 aa, Artificial Sequence
  Description of Artificial Sequence: Synthetic peptide
QQGSHVPFT

SEQ ID NO: 1381 - protein, 9 aa, Artificial Sequence
  Description of Artificial Sequence: Synthetic peptide
QQSYSVPLT

SEQ ID NO: 1382 - protein, 9 aa, Artificial Sequence
  Description of Artificial Sequence: Synthetic peptide
QQSYSVPLT

SEQ ID NO: 1383 - protein, 9 aa, Artificial Sequence
  Description of Artificial Sequence: Synthetic peptide
FQSSHTPFT

SEQ ID NO: 1384 - protein, 9 aa, Artificial Sequence
  Description of Artificial Sequence: Synthetic peptide
FQGSSTPLT

SEQ ID NO: 1385 - protein, 9 aa, Artificial Sequence
  Description of Artificial Sequence: Synthetic peptide
QQSSSYPFT

SEQ ID NO: 1386 - protein, 9 aa, Artificial Sequence
  Description of Artificial Sequence: Synthetic peptide
QQSYEYPFT

SEQ ID NO: 1387 - protein, 9 aa, Artificial Sequence
  Description of Artificial Sequence: Synthetic peptide
FQSSHTPLT

SEQ ID NO: 1388 - protein, 9 aa, Artificial Sequence
  Description of Artificial Sequence: Synthetic peptide
QQSSETPFT

SEQ ID NO: 1389 - protein, 9 aa, Artificial Sequence
  Description of Artificial Sequence: Synthetic peptide
FQSYSVPLT

SEQ ID NO: 1390 - protein, 9 aa, Artificial Sequence
  Description of Artificial Sequence: Synthetic peptide
FQSYETPLT

SEQ ID NO: 1391 - protein, 9 aa, Artificial Sequence
  Description of Artificial Sequence: Synthetic peptide
FQSSSTPFT

SEQ ID NO: 1392 - protein, 9 aa, Artificial Sequence
  Description of Artificial Sequence: Synthetic peptide
QQSYHYPFT

SEQ ID NO: 1393 - protein, 9 aa, Artificial Sequence
  Description of Artificial Sequence: Synthetic peptide
QQESSTPFT

SEQ ID NO: 1394 - protein, 9 aa, Artificial Sequence
  Description of Artificial Sequence: Synthetic peptide
QQSYHYPLT

SEQ ID NO: 1395 - protein, 9 aa, Artificial Sequence
  Description of Artificial Sequence: Synthetic peptide
QQSYHTPLT

SEQ ID NO: 1396 - protein, 9 aa, Artificial Sequence
  Description of Artificial Sequence: Synthetic peptide
QQSYEYPFT

SEQ ID NO: 1397 - protein, 9 aa, Artificial Sequence
  Description of Artificial Sequence: Synthetic peptide
QQGSSTPLT

SEQ ID NO: 1398 - protein, 9 aa, Artificial Sequence
  Description of Artificial Sequence: Synthetic peptide
QQGSSIPLT

SEQ ID NO: 1399 - protein, 9 aa, Artificial Sequence
  Description of Artificial Sequence: Synthetic peptide
FQSSSTPLT

SEQ ID NO: 1400 - protein, 9 aa, Artificial Sequence
  Description of Artificial Sequence: Synthetic peptide
QQSYHYPLT

SEQ ID NO: 1401 - protein, 9 aa, Artificial Sequence
  Description of Artificial Sequence: Synthetic peptide
FQGYETPLT

SEQ ID NO: 1402 - protein, 9 aa, Artificial Sequence
  Description of Artificial Sequence: Synthetic peptide
QQGYHTPLT

SEQ ID NO: 1403 - protein, 9 aa, Artificial Sequence
  Description of Artificial Sequence: Synthetic peptide
QQSSHVPFT

SEQ ID NO: 1404 - protein, 9 aa, Artificial Sequence
  Description of Artificial Sequence: Synthetic peptide
QQGYSYPLT

SEQ ID NO: 1405 - protein, 9 aa, Artificial Sequence
  Description of Artificial Sequence: Synthetic peptide
QQGSHVPFT

SEQ ID NO: 1406 - protein, 9 aa, Artificial Sequence
  Description of Artificial Sequence: Synthetic peptide
QQGYSVPLT

SEQ ID NO: 1407 - protein, 9 aa, Artificial Sequence
  Description of Artificial Sequence: Synthetic peptide
FQSYSVPFT

SEQ ID NO: 1408 - protein, 9 aa, Artificial Sequence
  Description of Artificial Sequence: Synthetic peptide
FQSYSYPLT

SEQ ID NO: 1409 - protein, 9 aa, Artificial Sequence
  Description of Artificial Sequence: Synthetic peptide
QQSYHYPLT

SEQ ID NO: 1410 - protein, 9 aa, Artificial Sequence
  Description of Artificial Sequence: Synthetic peptide
QQSSHVPFT

SEQ ID NO: 1411 - protein, 9 aa, Artificial Sequence
  Description of Artificial Sequence: Synthetic peptide
QQGSHVPFT

SEQ ID NO: 1412 - protein, 9 aa, Artificial Sequence
  Description of Artificial Sequence: Synthetic peptide
QQGYHVPFT

SEQ ID NO: 1413 - protein, 9 aa, Artificial Sequence
  Description of Artificial Sequence: Synthetic peptide
QQSYHVPFT

SEQ ID NO: 1414 - protein, 9 aa, Artificial Sequence
  Description of Artificial Sequence: Synthetic peptide
QQGYEYPFT

SEQ ID NO: 1415 - protein, 9 aa, Artificial Sequence
  Description of Artificial Sequence: Synthetic peptide
QQSYSYALT

SEQ ID NO: 1416 - protein, 9 aa, Artificial Sequence
  Description of Artificial Sequence: Synthetic peptide
QQGSEVPFT

SEQ ID NO: 1417 - protein, 9 aa, Artificial Sequence
  Description of Artificial Sequence: Synthetic peptide
QQSYSVPFT

SEQ ID NO: 1418 - protein, 9 aa, Artificial Sequence
  Description of Artificial Sequence: Synthetic peptide
FQGYSYPFT

SEQ ID NO: 1419 - protein, 9 aa, Artificial Sequence
  Description of Artificial Sequence: Synthetic peptide
QQGSSYPLT

SEQ ID NO: 1420 - protein, 9 aa, Artificial Sequence
  Description of Artificial Sequence: Synthetic peptide
QQSYHTPFT

SEQ ID NO: 1421 - protein, 9 aa, Artificial Sequence
  Description of Artificial Sequence: Synthetic peptide
QQGYEYPLT

SEQ ID NO: 1422 - protein, 9 aa, Artificial Sequence
  Description of Artificial Sequence: Synthetic peptide
QQSYSYPLT

SEQ ID NO: 1423 - protein, 9 aa, Artificial Sequence
  Description of Artificial Sequence: Synthetic peptide
QQGSEYPFT

SEQ ID NO: 1424 - protein, 9 aa, Artificial Sequence
  Description of Artificial Sequence: Synthetic peptide
FQSSSTPFT

SEQ ID NO: 1425 - protein, 9 aa, Artificial Sequence
  Description of Artificial Sequence: Synthetic peptide
QQSYSYPLT

SEQ ID NO: 1426 - protein, 9 aa, Artificial Sequence
  Description of Artificial Sequence: Synthetic peptide
QQGYSVPFT

SEQ ID NO: 1427 - protein, 9 aa, Artificial Sequence
  Description of Artificial Sequence: Synthetic peptide
QQSYSVPFT

SEQ ID NO: 1428 - protein, 9 aa, Artificial Sequence
  Description of Artificial Sequence: Synthetic peptide
FQSSSYPFT

SEQ ID NO: 1429 - protein, 9 aa, Artificial Sequence
  Description of Artificial Sequence: Synthetic peptide
QQGYHVPFT

SEQ ID NO: 1430 - protein, 9 aa, Artificial Sequence
  Description of Artificial Sequence: Synthetic peptide
QQSYSTPFT

SEQ ID NO: 1431 - protein, 9 aa, Artificial Sequence
  Description of Artificial Sequence: Synthetic peptide
QQSYHYPFT

SEQ ID NO: 1432 - protein, 9 aa, Artificial Sequence
  Description of Artificial Sequence: Synthetic peptide
QQSSHYPLT

SEQ ID NO: 1433 - protein, 9 aa, Artificial Sequence
  Description of Artificial Sequence: Synthetic peptide
FQGSHTPFT

SEQ ID NO: 1434 - protein, 9 aa, Artificial Sequence
  Description of Artificial Sequence: Synthetic peptide
FQGSSVPLT

SEQ ID NO: 1435 - protein, 9 aa, Artificial Sequence
  Description of Artificial Sequence: Synthetic peptide
FQSYHVPFT

SEQ ID NO: 1436 - protein, 9 aa, Artificial Sequence
  Description of Artificial Sequence: Synthetic peptide
QQSYSTPFT

SEQ ID NO: 1437 - protein, 9 aa, Artificial Sequence
  Description of Artificial Sequence: Synthetic peptide
QQGSEYPFT

SEQ ID NO: 1438 - protein, 9 aa, Artificial Sequence
  Description of Artificial Sequence: Synthetic peptide
QQSSHVPFT

SEQ ID NO: 1439 - protein, 9 aa, Artificial Sequence
  Description of Artificial Sequence: Synthetic peptide
QQGYSTPFT

SEQ ID NO: 1440 - protein, 9 aa, Artificial Sequence
  Description of Artificial Sequence: Synthetic peptide
QQGSEVPLT

SEQ ID NO: 1441 - protein, 9 aa, Artificial Sequence
  Description of Artificial Sequence: Synthetic peptide
FQGYSTPLT

SEQ ID NO: 1442 - protein, 9 aa, Artificial Sequence
  Description of Artificial Sequence: Synthetic peptide
FQSSEVPFT

SEQ ID NO: 1443 - protein, 9 aa, Artificial Sequence
  Description of Artificial Sequence: Synthetic peptide
FQSSSVPLT

SEQ ID NO: 1444 - protein, 9 aa, Artificial Sequence
  Description of Artificial Sequence: Synthetic peptide
QQGYSTPLT

SEQ ID NO: 1445 - protein, 9 aa, Artificial Sequence
  Description of Artificial Sequence: Synthetic peptide
QQGSEVPLT

SEQ ID NO: 1446 - protein, 9 aa, Artificial Sequence
  Description of Artificial Sequence: Synthetic peptide
QQGSHVPLT

SEQ ID NO: 1447 - protein, 9 aa, Artificial Sequence
  Description of Artificial Sequence: Synthetic peptide
QQGYSVPFT

SEQ ID NO: 1448 - protein, 9 aa, Artificial Sequence
  Description of Artificial Sequence: Synthetic peptide
FQGYEYPLT

SEQ ID NO: 1449 - protein, 9 aa, Artificial Sequence
  Description of Artificial Sequence: Synthetic peptide
QQGYHYPLT

SEQ ID NO: 1450 - protein, 9 aa, Artificial Sequence
  Description of Artificial Sequence: Synthetic peptide
QQGYHVPFT

SEQ ID NO: 1451 - protein, 9 aa, Artificial Sequence
  Description of Artificial Sequence: Synthetic peptide
FQGSSYPFT

SEQ ID NO: 1452 - protein, 9 aa, Artificial Sequence
  Description of Artificial Sequence: Synthetic peptide
FQSYHYPLT

SEQ ID NO: 1453 - protein, 9 aa, Artificial Sequence
  Description of Artificial Sequence: Synthetic peptide
QQSSHTPFT

SEQ ID NO: 1454 - protein, 9 aa, Artificial Sequence
  Description of Artificial Sequence: Synthetic peptide
QQGYEYPFT

SEQ ID NO: 1455 - protein, 9 aa, Artificial Sequence
  Description of Artificial Sequence: Synthetic peptide
QQGYEVPLT

SEQ ID NO: 1456 - protein, 9 aa, Artificial Sequence
  Description of Artificial Sequence: Synthetic peptide
QQSYHYPFT

SEQ ID NO: 1457 - protein, 9 aa, Artificial Sequence
  Description of Artificial Sequence: Synthetic peptide
QQGYSVPFT

SEQ ID NO: 1458 - protein, 9 aa, Artificial Sequence
  Description of Artificial Sequence: Synthetic peptide
FQSSHTPLT

SEQ ID NO: 1459 - protein, 9 aa, Artificial Sequence
  Description of Artificial Sequence: Synthetic peptide
FQSSSTPLT

SEQ ID NO: 1460 - protein, 9 aa, Artificial Sequence
  Description of Artificial Sequence: Synthetic peptide
FQSSEYPLT

SEQ ID NO: 1461 - protein, 9 aa, Artificial Sequence
  Description of Artificial Sequence: Synthetic peptide
FQSYHTPFT

SEQ ID NO: 1462 - protein, 9 aa, Artificial Sequence
  Description of Artificial Sequence: Synthetic peptide
QQSYSYPLT

SEQ ID NO: 1463 - protein, 9 aa, Artificial Sequence
  Description of Artificial Sequence: Synthetic peptide
FQSSHVPFT

SEQ ID NO: 1464 - protein, 9 aa, Artificial Sequence
  Description of Artificial Sequence: Synthetic peptide
QQGSETPFT

SEQ ID NO: 1465 - protein, 9 aa, Artificial Sequence
  Description of Artificial Sequence: Synthetic peptide
QQSSSYPFT

SEQ ID NO: 1466 - protein, 9 aa, Artificial Sequence
  Description of Artificial Sequence: Synthetic peptide
QQGSEYPFT

SEQ ID NO: 1467 - protein, 9 aa, Artificial Sequence
  Description of Artificial Sequence: Synthetic peptide
FQGSSYPLT

SEQ ID NO: 1468 - protein, 9 aa, Artificial Sequence
  Description of Artificial Sequence: Synthetic peptide
FQGSEVPLT

SEQ ID NO: 1469 - protein, 9 aa, Artificial Sequence
  Description of Artificial Sequence: Synthetic peptide
QQSSEYPLT

SEQ ID NO: 1470 - protein, 9 aa, Artificial Sequence
  Description of Artificial Sequence: Synthetic peptide
QQSYHTPLT

SEQ ID NO: 1471 - protein, 9 aa, Artificial Sequence
  Description of Artificial Sequence: Synthetic peptide
QQGSSYPLT

SEQ ID NO: 1472 - protein, 9 aa, Artificial Sequence
  Description of Artificial Sequence: Synthetic peptide
QQSYSVPFT

SEQ ID NO: 1473 - protein, 9 aa, Artificial Sequence
  Description of Artificial Sequence: Synthetic peptide
QQSSHYPLT

SEQ ID NO: 1474 - protein, 9 aa, Artificial Sequence
  Description of Artificial Sequence: Synthetic peptide
QQGYEVPFT

SEQ ID NO: 1475 - protein, 9 aa, Artificial Sequence
  Description of Artificial Sequence: Synthetic peptide
QQGSETPLT

SEQ ID NO: 1476 - protein, 9 aa, Artificial Sequence
  Description of Artificial Sequence: Synthetic peptide
FQGYNTPFT

SEQ ID NO: 1477 - protein, 9 aa, Artificial Sequence
  Description of Artificial Sequence: Synthetic peptide
FQGYETPLT

SEQ ID NO: 1478 - protein, 9 aa, Artificial Sequence
  Description of Artificial Sequence: Synthetic peptide
FQSSETPFT

SEQ ID NO: 1479 - protein, 9 aa, Artificial Sequence
  Description of Artificial Sequence: Synthetic peptide
QQSYHYPFT

SEQ ID NO: 1480 - protein, 9 aa, Artificial Sequence
  Description of Artificial Sequence: Synthetic peptide
FQSYSVPLT

SEQ ID NO: 1481 - protein, 9 aa, Artificial Sequence
  Description of Artificial Sequence: Synthetic peptide
FQSYSVPFT

SEQ ID NO: 1482 - protein, 9 aa, Artificial Sequence
  Description of Artificial Sequence: Synthetic peptide
FQSYSTPFT

SEQ ID NO: 1483 - protein, 9 aa, Artificial Sequence
  Description of Artificial Sequence: Synthetic peptide
QQGSSVPLT

SEQ ID NO: 1484 - protein, 9 aa, Artificial Sequence
  Description of Artificial Sequence: Synthetic peptide
QQGSETPLT

SEQ ID NO: 1485 - protein, 9 aa, Artificial Sequence
  Description of Artificial Sequence: Synthetic peptide
FQGSEYPLT

SEQ ID NO: 1486 - protein, 9 aa, Artificial Sequence
  Description of Artificial Sequence: Synthetic peptide
FQGSETPLT

SEQ ID NO: 1487 - protein, 9 aa, Artificial Sequence
  Description of Artificial Sequence: Synthetic peptide
QQSSEYPFT

SEQ ID NO: 1488 - protein, 9 aa, Artificial Sequence
  Description of Artificial Sequence: Synthetic peptide
QQSYHVPFT

SEQ ID NO: 1489 - protein, 9 aa, Artificial Sequence
  Description of Artificial Sequence: Synthetic peptide
QQSSEVPFT

SEQ ID NO: 1490 - protein, 9 aa, Artificial Sequence
  Description of Artificial Sequence: Synthetic peptide
QQGSHTPLT

SEQ ID NO: 1491 - protein, 9 aa, Artificial Sequence
  Description of Artificial Sequence: Synthetic peptide
QQSYSYPFT

SEQ ID NO: 1492 - protein, 9 aa, Artificial Sequence
  Description of Artificial Sequence: Synthetic peptide
QQSSHYPFT

SEQ ID NO: 1493 - protein, 9 aa, Artificial Sequence
  Description of Artificial Sequence: Synthetic peptide
FQSSETPFT

SEQ ID NO: 1494 - protein, 6 aa, Artificial Sequence
  Description of Artificial Sequence: Synthetic peptide
GIPSIR

SEQ ID NO: 1495 - protein, 7 aa, Artificial Sequence
  Description of Artificial Sequence: Synthetic peptide
GSIDSIH

SEQ ID NO: 1496 - protein, 6 aa, Artificial Sequence
  Description of Artificial Sequence: Synthetic peptide
GMTTIG

SEQ ID NO: 1497 - protein, 7 aa, Artificial Sequence
  Description of Artificial Sequence: Synthetic peptide
GRTFSDY

SEQ ID NO: 1498 - protein, 7 aa, Artificial Sequence
  Description of Artificial Sequence: Synthetic peptide
GRTFFSY

SEQ ID NO: 1499 - protein, 7 aa, Artificial Sequence
  Description of Artificial Sequence: Synthetic peptide
GNIFRIE

SEQ ID NO: 1500 - protein, 7 aa, Artificial Sequence
  Description of Artificial Sequence: Synthetic peptide
GFNFDDY

SEQ ID NO: 1501 - protein, 7 aa, Artificial Sequence
  Description of Artificial Sequence: Synthetic peptide
GFPFSEY

SEQ ID NO: 1502 - protein, 7 aa, Artificial Sequence
  Description of Artificial Sequence: Synthetic peptide
GFPFDDY

SEQ ID NO: 1503 - protein, 8 aa, Artificial Sequence
  Description of Artificial Sequence: Synthetic peptide
GFNLDDYA

SEQ ID NO: 1504 - protein, 5 aa, Artificial Sequence
  Description of Artificial Sequence: Synthetic peptide
GFGID

SEQ ID NO: 1505 - protein, 10 aa, Artificial Sequence
  Description of Artificial Sequence: Synthetic peptide
GFDFDNFDDY

SEQ ID NO: 1506 - protein, 7 aa, Artificial Sequence
  Description of Artificial Sequence: Synthetic peptide
GFGFGSY

SEQ ID NO: 1507 - protein, 7 aa, Artificial Sequence
  Description of Artificial Sequence: Synthetic peptide
GFPFSIW

SEQ ID NO: 1508 - protein, 7 aa, Artificial Sequence
  Description of Artificial Sequence: Synthetic peptide
GFSFDDY

SEQ ID NO: 1509 - protein, 7 aa, Artificial Sequence
  Description of Artificial Sequence: Synthetic peptide
GFPLDDY

SEQ ID NO: 1510 - protein, 7 aa, Artificial Sequence
  Description of Artificial Sequence: Synthetic peptide
GFPLDYY

SEQ ID NO: 1511 - protein, 7 aa, Artificial Sequence
  Description of Artificial Sequence: Synthetic peptide
GFAFSRY

SEQ ID NO: 1512 - protein, 7 aa, Artificial Sequence
  Description of Artificial Sequence: Synthetic peptide
GFSLDYY

SEQ ID NO: 1513 - protein, 7 aa, Artificial Sequence
  Description of Artificial Sequence: Synthetic peptide
GFAFSTA

SEQ ID NO: 1514 - protein, 7 aa, Artificial Sequence
  Description of Artificial Sequence: Synthetic peptide
GDTFNWY

SEQ ID NO: 1515 - protein, 7 aa, Artificial Sequence
  Description of Artificial Sequence: Synthetic peptide
GFAFDDY

SEQ ID NO: 1516 - protein, 7 aa, Artificial Sequence
  Description of Artificial Sequence: Synthetic peptide
GFTDDYY

SEQ ID NO: 1517 - protein, 7 aa, Artificial Sequence
  Description of Artificial Sequence: Synthetic peptide
GFTFENY

SEQ ID NO: 1518 - protein, 7 aa, Artificial Sequence
  Description of Artificial Sequence: Synthetic peptide
GFTFSTH

SEQ ID NO: 1519 - protein, 7 aa, Artificial Sequence
  Description of Artificial Sequence: Synthetic peptide
GSTFSKA

SEQ ID NO: 1520 - protein, 7 aa, Artificial Sequence
  Description of Artificial Sequence: Synthetic peptide
GSTFSSY

SEQ ID NO: 1521 - protein, 7 aa, Artificial Sequence
  Description of Artificial Sequence: Synthetic peptide
GYFASWY

SEQ ID NO: 1522 - protein, 7 aa, Artificial Sequence
  Description of Artificial Sequence: Synthetic peptide
GCTVSIN

SEQ ID NO: 1523 - protein, 7 aa, Artificial Sequence
  Description of Artificial Sequence: Synthetic peptide
GDIFSNY

SEQ ID NO: 1524 - protein, 7 aa, Artificial Sequence
  Description of Artificial Sequence: Synthetic peptide
GDIGSIN

SEQ ID NO: 1525 - protein, 7 aa, Artificial Sequence
  Description of Artificial Sequence: Synthetic peptide
GDISSIV

SEQ ID NO: 1526 - protein, 7 aa, Artificial Sequence
  Description of Artificial Sequence: Synthetic peptide
GDTFSSY

SEQ ID NO: 1527 - protein, 7 aa, Artificial Sequence
  Description of Artificial Sequence: Synthetic peptide
GDTFSWY

SEQ ID NO: 1528 - protein, 8 aa, Artificial Sequence
  Description of Artificial Sequence: Synthetic peptide
GERAFSNY

SEQ ID NO: 1529 - protein, 7 aa, Artificial Sequence
  Description of Artificial Sequence: Synthetic peptide
GFTFSTS

SEQ ID NO: 1530 - protein, 7 aa, Artificial Sequence
  Description of Artificial Sequence: Synthetic peptide
GSIYSLD

SEQ ID NO: 1531 - protein, 7 aa, Artificial Sequence
  Description of Artificial Sequence: Synthetic peptide
GFTIDDY

SEQ ID NO: 1532 - protein, 7 aa, Artificial Sequence
  Description of Artificial Sequence: Synthetic peptide
GFTLDAY

SEQ ID NO: 1533 - protein, 7 aa, Artificial Sequence
  Description of Artificial Sequence: Synthetic peptide
GFTDGID

SEQ ID NO: 1534 - protein, 7 aa, Artificial Sequence
  Description of Artificial Sequence: Synthetic peptide
GFTFDDT

SEQ ID NO: 1535 - protein, 7 aa, Artificial Sequence
  Description of Artificial Sequence: Synthetic peptide
GFTFDDY

SEQ ID NO: 1536 - protein, 7 aa, Artificial Sequence
  Description of Artificial Sequence: Synthetic peptide
GFTFDGY

SEQ ID NO: 1537 - protein, 7 aa, Artificial Sequence
  Description of Artificial Sequence: Synthetic peptide
GFTFDRS

SEQ ID NO: 1538 - protein, 8 aa, Artificial Sequence
  Description of Artificial Sequence: Synthetic peptide
GFTFDRSY

SEQ ID NO: 1539 - protein, 7 aa, Artificial Sequence
  Description of Artificial Sequence: Synthetic peptide
GFTFDYY

SEQ ID NO: 1540 - protein, 7 aa, Artificial Sequence
  Description of Artificial Sequence: Synthetic peptide
GFTFEDY

SEQ ID NO: 1541 - protein, 7 aa, Artificial Sequence
  Description of Artificial Sequence: Synthetic peptide
GFTFGHY

SEQ ID NO: 1542 - protein, 7 aa, Artificial Sequence
  Description of Artificial Sequence: Synthetic peptide
GFTFRRY

SEQ ID NO: 1543 - protein, 7 aa, Artificial Sequence
  Description of Artificial Sequence: Synthetic peptide
GFTFRSY

SEQ ID NO: 1544 - protein, 7 aa, Artificial Sequence
  Description of Artificial Sequence: Synthetic peptide
GFTFSEY

SEQ ID NO: 1545 - protein, 7 aa, Artificial Sequence
  Description of Artificial Sequence: Synthetic peptide
GFTFSGN

SEQ ID NO: 1546 - protein, 7 aa, Artificial Sequence
  Description of Artificial Sequence: Synthetic peptide
GFTFSRY

SEQ ID NO: 1547 - protein, 7 aa, Artificial Sequence
  Description of Artificial Sequence: Synthetic peptide
GFTFSSD

SEQ ID NO: 1548 - protein, 9 aa, Artificial Sequence
  Description of Artificial Sequence: Synthetic peptide
GFTFSSDDY

SEQ ID NO: 1549 - protein, 7 aa, Artificial Sequence
  Description of Artificial Sequence: Synthetic peptide
GYTYTTY

SEQ ID NO: 1550 - protein, 7 aa, Artificial Sequence
  Description of Artificial Sequence: Synthetic peptide
GNIFINN

SEQ ID NO: 1551 - protein, 7 aa, Artificial Sequence
  Description of Artificial Sequence: Synthetic peptide
GSIFSIN

SEQ ID NO: 1552 - protein, 7 aa, Artificial Sequence
  Description of Artificial Sequence: Synthetic peptide
GRTFSNT

SEQ ID NO: 1553 - protein, 7 aa, Artificial Sequence
  Description of Artificial Sequence: Synthetic peptide
GRTGTIY

SEQ ID NO: 1554 - protein, 7 aa, Artificial Sequence
  Description of Artificial Sequence: Synthetic peptide
GRTPSII

SEQ ID NO: 1555 - protein, 7 aa, Artificial Sequence
  Description of Artificial Sequence: Synthetic peptide
GSIDNIH

SEQ ID NO: 1556 - protein, 2 aa, Artificial Sequence
  Description of Artificial Sequence: Synthetic peptide
SP

SEQ ID NO: 1557 - protein, 6 aa, Artificial Sequence
  Description of Artificial Sequence: Synthetic peptide
SYSGSI

SEQ ID NO: 1558 - protein, 6 aa, Artificial Sequence
  Description of Artificial Sequence: Synthetic peptide
NPNNGY

SEQ ID NO: 1559 - protein, 12 aa, Artificial Sequence
  Description of Artificial Sequence: Synthetic peptide
VRDFWGGYDIDH

SEQ ID NO: 1560 - protein, 18 aa, Artificial Sequence
  Description of Artificial Sequence: Synthetic peptide
AGGPYYDLSTGSSGHLDY

SEQ ID NO: 1561 - protein, 14 aa, Artificial Sequence
  Description of Artificial Sequence: Synthetic peptide
AGPNYYDSDTRGDY

SEQ ID NO: 1562 - protein, 9 aa, Artificial Sequence
  Description of Artificial Sequence: Synthetic peptide
AEGYWYFDL

SEQ ID NO: 1563 - protein, 19 aa, Artificial Sequence
  Description of Artificial Sequence: Synthetic peptide
APYTSVAGRAYYYYYGMDV

SEQ ID NO: 1564 - protein, 15 aa, Artificial Sequence
  Description of Artificial Sequence: Synthetic peptide
LDILGGPDTVGAFDL

SEQ ID NO: 1565 - protein, 12 aa, Artificial Sequence
  Description of Artificial Sequence: Synthetic peptide
VARDRGYNYDSD

SEQ ID NO: 1566 - protein, 11 aa, Artificial Sequence
  Description of Artificial Sequence: Synthetic peptide
TFKTGYRSGYY

SEQ ID NO: 1567 - protein, 13 aa, Artificial Sequence
  Description of Artificial Sequence: Synthetic peptide
DQSAYGQTVFFDS

SEQ ID NO: 1568 - protein, 12 aa, Artificial Sequence
  Description of Artificial Sequence: Synthetic peptide
DPDDYGDYTFDY

SEQ ID NO: 1569 - protein, 11 aa, Artificial Sequence
  Description of Artificial Sequence: Synthetic peptide
WIHMKGGFLDY

SEQ ID NO: 1570 - protein, 11 aa, Artificial Sequence
  Description of Artificial Sequence: Synthetic peptide
ADCSGGVCNAY

SEQ ID NO: 1571 - protein, 7 aa, Artificial Sequence
  Description of Artificial Sequence: Synthetic peptide
TSWGLVY

SEQ ID NO: 1572 - protein, 11 aa, Artificial Sequence
  Description of Artificial Sequence: Synthetic peptide
GFSSGWYGWDS

SEQ ID NO: 1573 - protein, 20 aa, Artificial Sequence
  Description of Artificial Sequence: Synthetic peptide
ASPGRYCSGRSCYFDWYFHL

SEQ ID NO: 1574 - protein, 15 aa, Artificial Sequence
  Description of Artificial Sequence: Synthetic peptide
VNPSDYYDSRGYPDY

SEQ ID NO: 1575 - protein, 12 aa, Artificial Sequence
  Description of Artificial Sequence: Synthetic peptide
DREAYSYGYNDY

SEQ ID NO: 1576 - protein, 12 aa, Artificial Sequence
  Description of Artificial Sequence: Synthetic peptide
EETLQQLLRAYC

SEQ ID NO: 1577 - protein, 11 aa, Artificial Sequence
  Description of Artificial Sequence: Synthetic peptide
GPYGGASYFTV

SEQ ID NO: 1578 - protein, 11 aa, Artificial Sequence
  Description of Artificial Sequence: Synthetic peptide
DHPNYYYGMDV

SEQ ID NO: 1579 - protein, 22 aa, Artificial Sequence
  Description of Artificial Sequence: Synthetic peptide
EGPRVDLNYDFWSPDYYYYMDV

SEQ ID NO: 1580 - protein, 14 aa, Artificial Sequence
  Description of Artificial Sequence: Synthetic peptide
GGGPHYYYYYYMDV

SEQ ID NO: 1581 - protein, 17 aa, Artificial Sequence
  Description of Artificial Sequence: Synthetic peptide
EGEYSSSWYYYYYGMDV

SEQ ID NO: 1582 - protein, 13 aa, Artificial Sequence
  Description of Artificial Sequence: Synthetic peptide
DRPDYYYYYGMDV

SEQ ID NO: 1583 - protein, 12 aa, Artificial Sequence
  Description of Artificial Sequence: Synthetic peptide
AVGATSDDPFDM

SEQ ID NO: 1584 - protein, 10 aa, Artificial Sequence
  Description of Artificial Sequence: Synthetic peptide
SGGNYGDYVV

SEQ ID NO: 1585 - protein, 10 aa, Artificial Sequence
  Description of Artificial Sequence: Synthetic peptide
RGSGVATRVY

SEQ ID NO: 1586 - protein, 9 aa, Artificial Sequence
  Description of Artificial Sequence: Synthetic peptide
TRHDYSNVY

SEQ ID NO: 1587 - protein, 10 aa, Artificial Sequence
  Description of Artificial Sequence: Synthetic peptide
VTSGADAFDI

SEQ ID NO: 1588 - protein, 18 aa, Artificial Sequence
  Description of Artificial Sequence: Synthetic peptide
DQGREDDFWSGYDEPRDV

SEQ ID NO: 1589 - protein, 12 aa, Artificial Sequence
  Description of Artificial Sequence: Synthetic peptide
LEFNYYDSRQLR

SEQ ID NO: 1590 - protein, 11 aa, Artificial Sequence
  Description of Artificial Sequence: Synthetic peptide
ASSDYGDVSGP

SEQ ID NO: 1591 - protein, 12 aa, Artificial Sequence
  Description of Artificial Sequence: Synthetic peptide
TGSSSPDSYMDV

SEQ ID NO: 1592 - protein, 10 aa, Artificial Sequence
  Description of Artificial Sequence: Synthetic peptide
DVGNNWYADS

SEQ ID NO: 1593 - protein, 12 aa, Artificial Sequence
  Description of Artificial Sequence: Synthetic peptide
AAQDYGDSTFDF

SEQ ID NO: 1594 - protein, 8 aa, Artificial Sequence
  Description of Artificial Sequence: Synthetic peptide
CSGGSCNY

SEQ ID NO: 1595 - protein, 12 aa, Artificial Sequence
  Description of Artificial Sequence: Synthetic peptide
DLYYDSSGYYGG

SEQ ID NO: 1596 - protein, 11 aa, Artificial Sequence
  Description of Artificial Sequence: Synthetic peptide
AYCSGGSCYDY

SEQ ID NO: 1597 - protein, 11 aa, Artificial Sequence
  Description of Artificial Sequence: Synthetic peptide
VMESGYDYLDY

SEQ ID NO: 1598 - protein, 12 aa, Artificial Sequence
  Description of Artificial Sequence: Synthetic peptide
IVLVAVGELTDY

SEQ ID NO: 1599 - protein, 13 aa, Artificial Sequence
  Description of Artificial Sequence: Synthetic peptide
DWQSLVRGVSIDQ

SEQ ID NO: 1600 - protein, 16 aa, Artificial Sequence
  Description of Artificial Sequence: Synthetic peptide
GQLRYFDWLLDYYFDY

SEQ ID NO: 1601 - protein, 7 aa, Artificial Sequence
  Description of Artificial Sequence: Synthetic peptide
GNYYMDV

SEQ ID NO: 1602 - protein, 3 aa, Artificial Sequence
  Description of Artificial Sequence: Synthetic peptide
DQH

SEQ ID NO: 1603 - protein, 16 aa, Artificial Sequence
  Description of Artificial Sequence: Synthetic peptide
GPEWTPPGDYFYYMDV

SEQ ID NO: 1604 - protein, 7 aa, Artificial Sequence
  Description of Artificial Sequence: Synthetic peptide
GSYGGYV

SEQ ID NO: 1605 - protein, 11 aa, Artificial Sequence
  Description of Artificial Sequence: Synthetic peptide
QYCAAGSCYDK

SEQ ID NO: 1606 - protein, 9 aa, Artificial Sequence
  Description of Artificial Sequence: Synthetic peptide
AERGSERAY

SEQ ID NO: 1607 - protein, 11 aa, Artificial Sequence
  Description of Artificial Sequence: Synthetic peptide
DGDFWSGYRDY

SEQ ID NO: 1608 - protein, 10 aa, Artificial Sequence
  Description of Artificial Sequence: Synthetic peptide
DHYVWGTFDP

SEQ ID NO: 1609 - protein, 15 aa, Artificial Sequence
  Description of Artificial Sequence: Synthetic peptide
GVGYCGGMGCHEGDY

SEQ ID NO: 1610 - protein, 11 aa, Artificial Sequence
  Description of Artificial Sequence: Synthetic peptide
PYCSSTSCYSS

SEQ ID NO: 1611 - protein, 11 aa, Artificial Sequence
  Description of Artificial Sequence: Synthetic peptide
QMCGGGDCYIH

SEQ ID NO: 1612 - protein, 11 aa, Artificial Sequence
  Description of Artificial Sequence: Synthetic peptide
VYYDSSGYYDY

SEQ ID NO: 1613 - protein, 12 aa, Artificial Sequence
  Description of Artificial Sequence: Synthetic peptide
LWAGYDGDYFNY

SEQ ID NO: 1614 - protein, 11 aa, Artificial Sequence
  Description of Artificial Sequence: Synthetic peptide
SKLVGSTYVDY

SEQ ID NO: 1615 - protein, 9 aa, Artificial Sequence
  Description of Artificial Sequence: Synthetic peptide
WMGTYGDDY

SEQ ID NO: 1616 - protein, 6 aa, Artificial Sequence
  Description of Artificial Sequence: Synthetic peptide
AGYEDY

SEQ ID NO: 1617 - protein, 13 aa, Artificial Sequence
  Description of Artificial Sequence: Synthetic peptide
VESEDLLVDSLIY

SEQ ID NO: 1618 - protein, 11 aa, Artificial Sequence
  Description of Artificial Sequence: Synthetic peptide
VVYGSDSFDDF

SEQ ID NO: 1619 - protein, 10 aa, Artificial Sequence
  Description of Artificial Sequence: Synthetic peptide
AYDFWSGPVY

SEQ ID NO: 1620 - protein, 11 aa, Artificial Sequence
  Description of Artificial Sequence: Synthetic peptide
PNLRYTYGYDY

SEQ ID NO: 1621 - protein, 11 aa, Artificial Sequence
  Description of Artificial Sequence: Synthetic peptide
NRLTGDSSQVF

SEQ ID NO: 1622 - protein, 16 aa, Artificial Sequence
  Description of Artificial Sequence: Synthetic peptide
GPYYYDSSGYYGPNDY

SEQ ID NO: 1623 - protein, 13 aa, Artificial Sequence
  Description of Artificial Sequence: Synthetic peptide
AGDTRNDYNYGAY

SEQ ID NO: 1624 - protein, 11 aa, Artificial Sequence
  Description of Artificial Sequence: Synthetic peptide
GAQWEQRTYDS

SEQ ID NO: 1625 - protein, 8 aa, Artificial Sequence
  Description of Artificial Sequence: Synthetic peptide
ALDGYSGS

SEQ ID NO: 1626 - protein, 15 aa, Artificial Sequence
  Description of Artificial Sequence: Synthetic peptide
LVVPANTYFYYAMDV

SEQ ID NO: 1627 - protein, 13 aa, Artificial Sequence
  Description of Artificial Sequence: Synthetic peptide
DGADTAPIYGMAV

SEQ ID NO: 1628 - protein, 10 aa, Artificial Sequence
  Description of Artificial Sequence: Synthetic peptide
EPGPADYRDY

SEQ ID NO: 1629 - protein, 14 aa, Artificial Sequence
  Description of Artificial Sequence: Synthetic peptide
DLSGRGDVSEYEYD

SEQ ID NO: 1630 - protein, 11 aa, Artificial Sequence
  Description of Artificial Sequence: Synthetic peptide
VANDYGNYEPS

SEQ ID NO: 1631 - protein, 11 aa, Artificial Sequence
  Description of Artificial Sequence: Synthetic peptide
DYYDSSGYYYV

SEQ ID NO: 1632 - protein, 13 aa, Artificial Sequence
  Description of Artificial Sequence: Synthetic peptide
GTFDVLRFLEWRL

SEQ ID NO: 1633 - protein, 13 aa, Artificial Sequence
  Description of Artificial Sequence: Synthetic peptide
YYDSSGYSQDFDY

SEQ ID NO: 1634 - protein, 8 aa, Artificial Sequence
  Description of Artificial Sequence: Synthetic peptide
TSYYGDFE

SEQ ID NO: 1635 - protein, 12 aa, Artificial Sequence
  Description of Artificial Sequence: Synthetic peptide
GRSRGTSGTTAD

SEQ ID NO: 1636 - protein, 14 aa, Artificial Sequence
  Description of Artificial Sequence: Synthetic peptide
VGLGSCSTTSCFDY

SEQ ID NO: 1637 - protein, 11 aa, Artificial Sequence
  Description of Artificial Sequence: Synthetic peptide
GPTGPPRFFDF

SEQ ID NO: 1638 - protein, 4 aa, Artificial Sequence
  Description of Artificial Sequence: Synthetic peptide
GASY

SEQ ID NO: 1639 - protein, 8 aa, Artificial Sequence
  Description of Artificial Sequence: Synthetic peptide
VGAAGAVF

SEQ ID NO: 1640 - protein, 8 aa, Artificial Sequence
  Description of Artificial Sequence: Synthetic peptide
GSGGGVDY

SEQ ID NO: 1641 - protein, 13 aa, Artificial Sequence
  Description of Artificial Sequence: Synthetic peptide
ANKYYYDYYGVDV

SEQ ID NO: 1642 - protein, 14 aa, Artificial Sequence
  Description of Artificial Sequence: Synthetic peptide
GPDMIRSWYAWFDP

SEQ ID NO: 1643 - protein, 16 aa, Artificial Sequence
  Description of Artificial Sequence: Synthetic peptide
LFGSPSSSADYYYFDL

SEQ ID NO: 1644 - protein, 17 aa, Artificial Sequence
  Description of Artificial Sequence: Synthetic peptide
DRCGGDCNFSVLDWFDP

SEQ ID NO: 1645 - protein, 13 aa, Artificial Sequence
  Description of Artificial Sequence: Synthetic peptide
IISSTTGTDYFQN

SEQ ID NO: 1646 - protein, 15 aa, Artificial Sequence
  Description of Artificial Sequence: Synthetic peptide
AGGYDYVWGSYPSDY

SEQ ID NO: 1647 - protein, 21 aa, Artificial Sequence
  Description of Artificial Sequence: Synthetic peptide
VGEQTEYVDGTGYDYFYAMDV

SEQ ID NO: 1648 - protein, 10 aa, Artificial Sequence
  Description of Artificial Sequence: Synthetic peptide
SPGIRGPINH

SEQ ID NO: 1649 - protein, 15 aa, Artificial Sequence
  Description of Artificial Sequence: Synthetic peptide
DFDYGDYWERDAFDI

SEQ ID NO: 1650 - protein, 13 aa, Artificial Sequence
  Description of Artificial Sequence: Synthetic peptide
GRVGVYGDYLFDH

SEQ ID NO: 1651 - protein, 16 aa, Artificial Sequence
  Description of Artificial Sequence: Synthetic peptide
RSSQSLVNSNGNTYLA

SEQ ID NO: 1652 - protein, 16 aa, Artificial Sequence
  Description of Artificial Sequence: Synthetic peptide
RSSQSLVHSDCKTYLA

SEQ ID NO: 1653 - protein, 8 aa, Artificial Sequence
  Description of Artificial Sequence: Synthetic peptide
KASNRLSG

SEQ ID NO: 1654 - protein, 9 aa, Artificial Sequence
  Description of Artificial Sequence: Synthetic peptide
QQSSETPLT

SEQ ID NO: 1655 - protein, 9 aa, Artificial Sequence
  Description of Artificial Sequence: Synthetic peptide
FQGSEYPFT

SEQ ID NO: 1656 - protein, 9 aa, Artificial Sequence
  Description of Artificial Sequence: Synthetic peptide
QQGYETPFT

SEQ ID NO: 1657 - protein, 9 aa, Artificial Sequence
  Description of Artificial Sequence: Synthetic peptide
FQGYHTPLT

SEQ ID NO: 1658 - protein, 9 aa, Artificial Sequence
  Description of Artificial Sequence: Synthetic peptide
FQGYHTPFT

SEQ ID NO: 1659 - protein, 9 aa, Artificial Sequence
  Description of Artificial Sequence: Synthetic peptide
QQSYSTPLT

SEQ ID NO: 1660 - protein, 9 aa, Artificial Sequence
  Description of Artificial Sequence: Synthetic peptide
QQSYEVPLT

SEQ ID NO: 1661 - protein, 9 aa, Artificial Sequence
  Description of Artificial Sequence: Synthetic peptide
QQSSSTPFT

SEQ ID NO: 1662 - protein, 9 aa, Artificial Sequence
  Description of Artificial Sequence: Synthetic peptide
QQGSEYPLT

SEQ ID NO: 1663 - protein, 9 aa, Artificial Sequence
  Description of Artificial Sequence: Synthetic peptide
QQGSSVPFT

SEQ ID NO: 1664 - protein, 9 aa, Artificial Sequence
  Description of Artificial Sequence: Synthetic peptide
FQGYEVPFT

SEQ ID NO: 1665 - protein, 9 aa, Artificial Sequence
  Description of Artificial Sequence: Synthetic peptide
FQGSHYPLT

SEQ ID NO: 1666 - protein, 9 aa, Artificial Sequence
  Description of Artificial Sequence: Synthetic peptide
FQSYEYPFT

SEQ ID NO: 1667 - protein, 37 aa, Artificial Sequence
  Description of Artificial Sequence: Synthetic polypeptide
  MOD_RES (15)..(19): Any amino acid
CARDLRELECEEWTXXXXXSRGPCVDPRGVAGSFDVW

SEQ ID NO: 1668 - protein, 26 aa, Artificial Sequence
  Description of Artificial Sequence: Synthetic peptide
  MOD_RES (10)..(14): Any amino acid
CARDMYYDFXXXXXEVVPADDAFDIW

SEQ ID NO: 1669 - protein, 35 aa, Artificial Sequence
  Description of Artificial Sequence: Synthetic polypeptide
  MOD_RES (17)..(21): Any amino acid
CARDGRGSLPRPKGGPXXXXXYDSSEDSGGAFDIW

SEQ ID NO: 1670 - protein, 23 aa, Artificial Sequence
  Description of Artificial Sequence: Synthetic peptide
  MOD_RES (9)..(13): Any amino acid
CARANQHFXXXXXGYHYYGMDVW

SEQ ID NO: 1671 - protein, 25 aa, Artificial Sequence
  Description of Artificial Sequence: Synthetic peptide
  MOD_RES (9)..(13): Any amino acid
CAKHMSMQXXXXXRADLVGDAFDVW

SEQ ID NO: 1672 - protein, 15 aa, Artificial Sequence
  Description of Artificial Sequence: Synthetic peptide
GGGGSGGGGSGGGGS

SEQ ID NO: 1673 - protein, 14 aa, Artificial Sequence
  Description of Artificial Sequence: Synthetic peptide
YRKCRGGRRWCYRK

SEQ ID NO: 1674 - protein, 22 aa, Artificial Sequence
  Description of Artificial Sequence: Synthetic peptide
GSGGYRKCRGGRRWCYRKGGGS

SEQ ID NO: 1675 - protein, 14 aa, Unknown
  Description of Unknown: CXCR4 sequence
YRKCRGGRRWCYQK

SEQ ID NO: 1676 - protein, 14 aa, Artificial Sequence
  Description of Artificial Sequence: Synthetic peptide
YRKCRGTRRWCYQK

SEQ ID NO: 1677 - protein, 14 aa, Artificial Sequence
  Description of Artificial Sequence: Synthetic peptide
YRKCRGGHRWCYQK

SEQ ID NO: 1678 - protein, 14 aa, Artificial Sequence
  Description of Artificial Sequence: Synthetic peptide
YRKCRGQRRWCYQK

SEQ ID NO: 1679 - protein, 14 aa, Artificial Sequence
  Description of Artificial Sequence: Synthetic peptide
YKKCRGGRRWCYQK

SEQ ID NO: 1680 - protein, 14 aa, Artificial Sequence
  Description of Artificial Sequence: Synthetic peptide
YRKCRGGRRWCYAK

SEQ ID NO: 1681 - protein, 14 aa, Artificial Sequence
  Description of Artificial Sequence: Synthetic peptide
YRMCRGGRRWCYQK

SEQ ID NO: 1682 - protein, 14 aa, Artificial Sequence
  Description of Artificial Sequence: Synthetic peptide
YRRCRGGRRWCYQK

SEQ ID NO: 1683 - protein, 14 aa, Artificial Sequence
  Description of Artificial Sequence: Synthetic peptide
YRKCRGGKRWCYQK

SEQ ID NO: 1684 - protein, 14 aa, Artificial Sequence
  Description of Artificial Sequence: Synthetic peptide
YRKCRGGRKWCYQK

SEQ ID NO: 1685 - protein, 14 aa, Artificial Sequence
  Description of Artificial Sequence: Synthetic peptide
YRKCRGMRRWCYQK

SEQ ID NO: 1686 - protein, 14 aa, Artificial Sequence
  Description of Artificial Sequence: Synthetic peptide
YRKCRGGRRWCYNK

SEQ ID NO: 1687 - protein, 14 aa, Artificial Sequence
  Description of Artificial Sequence: Synthetic peptide
YRKCRGGRRWCFQK

SEQ ID NO: 1688 - protein, 14 aa, Artificial Sequence
  Description of Artificial Sequence: Synthetic peptide
YRWCRGGRRWCYQK

SEQ ID NO: 1689 - protein, 14 aa, Artificial Sequence
  Description of Artificial Sequence: Synthetic peptide
YRKCRGIRRWCYQK

SEQ ID NO: 1690 - protein, 14 aa, Artificial Sequence
  Description of Artificial Sequence: Synthetic peptide
YRKCKGGRRWCYQK
